United States Patent Application Publication US 2026/0022371 A1 - sequence listing, part 6

SEQ ID NO: 102631 - DNA, 80 bp, synthetic construct
  source 1..80: mol_type = other DNA
agttgcagaagaaaaattctgatcacactaataggaaaaaactgttggaggcttttaaaaaaagttttaatctcttctgt

SEQ ID NO: 102632 - DNA, 80 bp, synthetic construct; identical to SEQ ID NO: 19666
  source 1..80: mol_type = other DNA

SEQ ID NO: 102633 - DNA, 80 bp, synthetic construct
  source 1..80: mol_type = other DNA
tatattgtcaacataattttagtggcaacatgatagttcaatatctagaatattatacaatatctgtaataatatacttg

SEQ ID NO: 102634 - DNA, 80 bp, synthetic construct
  source 1..80: mol_type = other DNA
gtagggacatggatgaagctggaaaccatcattctcagcaaactatcgcaaggacaaaaaaccaaacactgcatgttctc

SEQ ID NO: 102635 - DNA, 80 bp, synthetic construct
  source 1..80: mol_type = other DNA
catggcacatgtatacgtatgtaacaaacctgcacattgggcacatgtaccctagaacttaaagtataataaaaaataaa

SEQ ID NO: 102636 - DNA, 80 bp, synthetic construct; identical to SEQ ID NO: 19667
  source 1..80: mol_type = other DNA

SEQ ID NO: 102637 - DNA, 80 bp, synthetic construct
  source 1..80: mol_type = other DNA
ttatctaccattgctaactaacattgttctggaaattttggctgacatgtcaagatataaaacaacataaaacagtttca

SEQ ID NO: 102638 - DNA, 80 bp, synthetic construct
  source 1..80: mol_type = other DNA
tacataatagttgggttaagagcctcaacttggttgttagatttggattcagtctgtttgccacatgctggacagcctgg

SEQ ID NO: 102639 - DNA, 80 bp, synthetic construct
  source 1..80: mol_type = other DNA
aataatcatagtatctacctcagagttactagaaacattaaggagaaagcatatgttaatagttataggtacagtgccta

SEQ ID NO: 102640 - DNA, 80 bp, synthetic construct
  source 1..80: mol_type = other DNA
gcacaatttatatttaaagtctataaacataggggattatcgtgggctacctgtcttgaggtcagactgacatttctgct

SEQ ID NO: 102641 - DNA, 80 bp, synthetic construct; identical to SEQ ID NO: 19668
  source 1..80: mol_type = other DNA

SEQ ID NO: 102642 - DNA, 80 bp, synthetic construct
  source 1..80: mol_type = other DNA
gcagtgcacttgcttcgtgatggtagtgtacttcgagttcctaccacattcgtctttgtatctctgttcttacaacacat

SEQ ID NO: 102643 - DNA, 80 bp, synthetic construct
  source 1..80: mol_type = other DNA
gaagaataaggagatgatggtgttgcaagagtgattactcctgtggaaatgcacgtgtatgtagacacacaataaacctc

SEQ ID NO: 102644 - DNA, 80 bp, synthetic construct
  source 1..80: mol_type = other DNA
cagatgatcatgaatatcacatgaagtgagagatgtacaaatacatccccagttacttgtcttcctgtactgacagagaa

SEQ ID NO: 102645 - DNA, 80 bp, synthetic construct; identical to SEQ ID NO: 19669
  source 1..80: mol_type = other DNA

SEQ ID NO: 102646 - DNA, 80 bp, synthetic construct
  source 1..80: mol_type = other DNA
gtagtggtgcacacctgtggtcccagctacttgggaacctgaggtaggaggatcacttgagtctaggagttcaaggccag

SEQ ID NO: 102647 - DNA, 80 bp, synthetic construct
  source 1..80: mol_type = other DNA
cttccagcctgagctacagagcaaccttgtctcaaacacaaacaacagacgaacaaaacctctacttacaactactgatt

SEQ ID NO: 102648 - DNA, 80 bp, synthetic construct; identical to SEQ ID NO: 19670
  source 1..80: mol_type = other DNA

SEQ ID NO: 102649 - DNA, 80 bp, synthetic construct
  source 1..80: mol_type = other DNA
actgggtgttagccatattaatgtacactaattagtttgtgaagtaattctacatgtctctctcaaaaatgtttttaagt

SEQ ID NO: 102650 - DNA, 80 bp, synthetic construct
  source 1..80: mol_type = other DNA
ttggagaatcaaaataggagaacacaaacttgatgttcttctcaatactctgaggactttgcattgactttatatatccc

SEQ ID NO: 102651 - DNA, 80 bp, synthetic construct
  source 1..80: mol_type = other DNA
atggaaggaaatagttcaacttttattaagttgttcccttcaagagtgagatcaagctatcctctcactccactccccct

SEQ ID NO: 102652 - DNA, 80 bp, synthetic construct
  source 1..80: mol_type = other DNA
attccaagaacccctggcaccagaaagataaataaatatattattctgattttgttttgtacaggctctatcattcctct

SEQ ID NO: 102653 - DNA, 80 bp, synthetic construct; identical to SEQ ID NO: 19671
  source 1..80: mol_type = other DNA

SEQ ID NO: 102654 - DNA, 80 bp, synthetic construct
  source 1..80: mol_type = other DNA
aagctacctgcaactgtaaaaatgtgaattggatgaatgaagataaagaattctgccaggtgacattcaggttagattat

SEQ ID NO: 102655 - DNA, 80 bp, synthetic construct
  source 1..80: mol_type = other DNA
tggagaaacctcagtaaacaaaacataccaagtcccactgttagggacttacattctggcattgaggaattaggaaaaaa

SEQ ID NO: 102656 - DNA, 80 bp, synthetic construct; identical to SEQ ID NO: 19672
  source 1..80: mol_type = other DNA

SEQ ID NO: 102657 - DNA, 80 bp, synthetic construct
  source 1..80: mol_type = other DNA
gagtcagcatccaaaaataactactgagaacattttcaaaaaattgttacaattgtcacgtcacaaaaccccaagtcctt

SEQ ID NO: 102658 - DNA, 80 bp, synthetic construct
  source 1..80: mol_type = other DNA
aaagacatcaaccttccctaagtgtcacacccagtttctaggagaagaatcttattttatcctaagctaaggcttaattc

SEQ ID NO: 102659 - DNA, 80 bp, synthetic construct
  source 1..80: mol_type = other DNA
tacaccctgcctctaagcagcgatcagaaggagaaaaagtacgagttggagatgacctcatcttagttagcgtgtcctct

SEQ ID NO: 102660 - DNA, 80 bp, synthetic construct; identical to SEQ ID NO: 19673
  source 1..80: mol_type = other DNA

SEQ ID NO: 102661 - DNA, 80 bp, synthetic construct
  source 1..80: mol_type = other DNA
aagcaaattattatgtgaggaacacatgccatgttaagaagggagaaatagacaaaagaagaaatagtttgaagtctatc

SEQ ID NO: 102662 - DNA, 80 bp, synthetic construct
  source 1..80: mol_type = other DNA
tacagtcatggtggaaggtgaaagacacgtctcatgtggcagcagacaagagacaagagcttgtgcaggggaactcctct

SEQ ID NO: 102663 - DNA, 80 bp, synthetic construct
  source 1..80: mol_type = other DNA
attttgaacttttgtggtaaggtcaatatgtatttaatttaacttatttagtaagttgtagttttgccagagagtagtcc

SEQ ID NO: 102664 - DNA, 80 bp, synthetic construct; identical to SEQ ID NO: 19674
  source 1..80: mol_type = other DNA

SEQ ID NO: 102665 - DNA, 80 bp, synthetic construct
  source 1..80: mol_type = other DNA
atttctaggaagattggttttgttttgtttcacttgccttgtagaagaggtaatgatgaagacaaggaaatggtataaca

SEQ ID NO: 102666 - DNA, 80 bp, synthetic construct
  source 1..80: mol_type = other DNA
caccatgcgaatttctaggacaatacaggtgtgcagattgtaaaataagcattaattaagctcttgctatatgcatgtgc

SEQ ID NO: 102667 - DNA, 80 bp, synthetic construct
  source 1..80: mol_type = other DNA
gttgttgttgttttacaatttgtacttccgctacgtatcagagtttatttgacaggatggcatcattatgcactgaaaaa

SEQ ID NO: 102668 - DNA, 80 bp, synthetic construct; identical to SEQ ID NO: 19675
  source 1..80: mol_type = other DNA

SEQ ID NO: 102669 - DNA, 80 bp, synthetic construct
  source 1..80: mol_type = other DNA
tttacctcctatagaaggaaataaacctcatgattaattaaaatttacaagtgatttccaaactacattttattgttttt

SEQ ID NO: 102670 - DNA, 80 bp, synthetic construct
  source 1..80: mol_type = other DNA
tgtgctacatagccaattatttatgttctctttcctggtaatcttttatatggagctataagagagcagccaaccaggtt

SEQ ID NO: 102671 - DNA, 80 bp, synthetic construct
  source 1..80: mol_type = other DNA
gctgtatgaggatattgtaagacagtaaatacgcattacagtatagcttagagatgctgaaggacattcctatgggtata

SEQ ID NO: 102672 - DNA, 80 bp, synthetic construct
  source 1..80: mol_type = other DNA
ggcagagggagttgaaataatctatagaataaaccctgaataactaaagttgggctgtgtgtatatatatgcacacttgc

SEQ ID NO: 102673 - DNA, 80 bp, synthetic construct; identical to SEQ ID NO: 19676
  source 1..80: mol_type = other DNA

SEQ ID NO: 102674 - DNA, 80 bp, synthetic construct
  source 1..80: mol_type = other DNA
ccagcatagccaaaaagcaagaccctgtctctactaaaaaatacaaaaattaggccaggcgcggtggctcatgcctgtaa

SEQ ID NO: 102675 - DNA, 80 bp, synthetic construct
  source 1..80: mol_type = other DNA
gctgagatcgcaccattgcattccagcctgggcgacaagagtgaaattccatctcaaaagaaaaaaaagaaatgatctgg

SEQ ID NO: 102676 - DNA, 80 bp, synthetic construct
  source 1..80: mol_type = other DNA
aaaaaaaaaaaaagaatgcttaaagaaacagcagatatttaaccagaagaagagatagttgggaaagaaacagtgaaagg

SEQ ID NO: 102677 - DNA, 80 bp, synthetic construct; identical to SEQ ID NO: 19677
  source 1..80: mol_type = other DNA

SEQ ID NO: 102678 - DNA, 80 bp, synthetic construct
  source 1..80: mol_type = other DNA
ttatatgttgaacattggggctcaattctgaggtataaagggtcttaagctctaaaaatggttgtaaacgcctcacccag

SEQ ID NO: 102679 - DNA, 80 bp, synthetic construct
  source 1..80: mol_type = other DNA
ttaaagaaggccttagcaaagcaccttaagagaaatatacaatttaaaatagaaaaaacatggccaagtagatattactg

SEQ ID NO: 102680 - DNA, 80 bp, synthetic construct; identical to SEQ ID NO: 19678
  source 1..80: mol_type = other DNA

SEQ ID NO: 102681 - DNA, 80 bp, synthetic construct
  source 1..80: mol_type = other DNA
ttttttattatactttaagttctagggtacatgtgcacaacgtgcaggattgttacatatgtatacatgtgccatgttgg

SEQ ID NO: 102682 - DNA, 80 bp, synthetic construct
  source 1..80: mol_type = other DNA
ttctcattattcaattcccacctatgagtgagaacattcggtgtttcgttttctatcgttgcgatagtttgctgagaatg

SEQ ID NO: 102683 - DNA, 80 bp, synthetic construct
  source 1..80: mol_type = other DNA
agcctttctttcctctgtggctcaggtaatggaaccataaaatattacatttggaaagaacatctatttctctgcccctc

SEQ ID NO: 102684 - DNA, 80 bp, synthetic construct
  source 1..80: mol_type = other DNA
tgaataattgcatcagataagggttcaattgagagattcttggtacgaagtttttgtaccatggacttccattgcaaatt

SEQ ID NO: 102685 - DNA, 80 bp, synthetic construct; identical to SEQ ID NO: 19679
  source 1..80: mol_type = other DNA

SEQ ID NO: 102686 - DNA, 80 bp, synthetic construct
  source 1..80: mol_type = other DNA
gctgcaagctccacctcccgggttcacgccattctcctgcctcagcctcctgagtagctgggactgtaggtgcctgccac

SEQ ID NO: 102687 - DNA, 80 bp, synthetic construct
  source 1..80: mol_type = other DNA
ttaaatacaatatcctctgaagattcatgtgcctattagagcttgaaaatcactagtcctgggatcaaagtgagacccgg

SEQ ID NO: 102688 - DNA, 80 bp, synthetic construct
  source 1..80: mol_type = other DNA
cagtttcagtaactgaaactgttgttgctttctgaatattgcataccacaagcctgacgtgatgtagtttttacccagac

SEQ ID NO: 102689 - DNA, 80 bp, synthetic construct
  source 1..80: mol_type = other DNA
gcataccacaagcctgacgtgatgtagtttttacccagacttccctttgctgtttaagcagcaaaattggaagcattcaa

SEQ ID NO: 102690 - DNA, 80 bp, synthetic construct; identical to SEQ ID NO: 19680
  source 1..80: mol_type = other DNA

SEQ ID NO: 102691 - DNA, 80 bp, synthetic construct
  source 1..80: mol_type = other DNA
ccttctcagaacttcttagagggccagggggcccagcccacttctgatagcaaggtttctggtatgttaaaaataaaaat

SEQ ID NO: 102692 - DNA, 80 bp, synthetic construct
  source 1..80: mol_type = other DNA
ctcaaagcccccaacccatgagaaactctgctctcattttgttgtctgcagtgttctctccttacaattcctgtagcacg

SEQ ID NO: 102693 - DNA, 80 bp, synthetic construct
  source 1..80: mol_type = other DNA
ggttcacaccattttcctgcctcagcctcctgagtaactgggattacaagtgcctgccaccatgcctggctaattttttg

SEQ ID NO: 102694 - DNA, 80 bp, synthetic construct
  source 1..80: mol_type = other DNA
cggccgtatttattttttaatttaattggtacataatttattttattggtacaaaatatcacatgtagcccataaatatg

SEQ ID NO: 102695 - DNA, 80 bp, synthetic construct; identical to SEQ ID NO: 19681
  source 1..80: mol_type = other DNA

SEQ ID NO: 102696 - DNA, 80 bp, synthetic construct
  source 1..80: mol_type = other DNA
gaattattttcagagtttggttaaaatcggtgtcattcacatggatttgtatgtgtgtgtgcctgtgcacgtgctttttt

SEQ ID NO: 102697 - DNA, 80 bp, synthetic construct
  source 1..80: mol_type = other DNA
acattgccagatgctaggaacacagctgtgaacctgtgtcaggtagcttctaaaagggaaaaagaaaataagcccaagaa

SEQ ID NO: 102698 - DNA, 80 bp, synthetic construct
  source 1..80: mol_type = other DNA
agaatgacagattgaagtaaagaagaaattgtacaaaagcaggcagctagttgaggttgaggagaggaataagagcaaat

SEQ ID NO: 102699 - DNA, 80 bp, synthetic construct; identical to SEQ ID NO: 19682
  source 1..80: mol_type = other DNA

SEQ ID NO: 102700 - DNA, 80 bp, synthetic construct
  source 1..80: mol_type = other DNA
cgatgtttactgagaagactccacgaaaacaggtggttgctctatgtatgtttgaaattctagaggcagccaagttatga

SEQ ID NO: 102701 - DNA, 80 bp, synthetic construct
  source 1..80: mol_type = other DNA
cttggttttagatagctgttaggaaatatcgccatctaatggcttttgcatcaaattgcagataacagttcctgaaggac

SEQ ID NO: 102702 - DNA, 80 bp, synthetic construct
  source 1..80: mol_type = other DNA
ttcatcatcaaaaagctgtcagagtgtgatatgtagaaaacctaattataattttaagtgctcattttgttcatcaacca

SEQ ID NO: 102703 - DNA, 80 bp, synthetic construct; identical to SEQ ID NO: 19683
  source 1..80: mol_type = other DNA

SEQ ID NO: 102704 - DNA, 80 bp, synthetic construct
  source 1..80: mol_type = other DNA
aaaactccacttcaattagagggcctgtccttgctgcaaagttgacagtcatctttggaattgtgataatgagctgattg

SEQ ID NO: 102705 - DNA, 80 bp, synthetic construct
  source 1..80: mol_type = other DNA
tatgtgatagcttcctatggattgttttcttcaattttttgacctcagagtattgcctggttggactaatgtcaagattt

SEQ ID NO: 102706 - DNA, 80 bp, synthetic construct
  source 1..80: mol_type = other DNA
ctaaatgtgtttgtatgtttaacagaggattttatgtgtctgaggtcatgcttttagtgggaatatccctaactgtggga

SEQ ID NO: 102707 - DNA, 80 bp, synthetic construct; identical to SEQ ID NO: 19684
  source 1..80: mol_type = other DNA

SEQ ID NO: 102708 - DNA, 80 bp, synthetic construct
  source 1..80: mol_type = other DNA
attgattcactgaagtgatccatttgttgccccctcttagctttttctcatgttatatttctattacctaccaacagaag

SEQ ID NO: 102709 - DNA, 80 bp, synthetic construct
  source 1..80: mol_type = other DNA
tttgaagtcagagttctcaaattgcgtacaattttaggaccctttgctatgacctctcatttattgatacagatgataga

SEQ ID NO: 102710 - DNA, 80 bp, synthetic construct
  source 1..80: mol_type = other DNA
tacaaattaatcaatgaatgtagtaagatgaatatgtaaataagagattgcagtgagagaaggtactgtgtggatggttt

SEQ ID NO: 102711 - DNA, 80 bp, synthetic construct; identical to SEQ ID NO: 19685
  source 1..80: mol_type = other DNA

SEQ ID NO: 102712 - DNA, 80 bp, synthetic construct
  source 1..80: mol_type = other DNA
attagtttcaaacagaaatataaacttaagaactagagagatgtcaagcatattctgggaatagcaattattccagagtg

SEQ ID NO: 102713 - DNA, 80 bp, synthetic construct
  source 1..80: mol_type = other DNA
gagaacttagattagaggtggggagaatctgagtcacggaaatgaaatgcagtaattcgtgtgacaaaatccaagaactt

SEQ ID NO: 102714 - DNA, 80 bp, synthetic construct; identical to SEQ ID NO: 19686
  source 1..80: mol_type = other DNA

SEQ ID NO: 102715 - DNA, 80 bp, synthetic construct
  source 1..80: mol_type = other DNA
taaaggaatggggtctatcatatgttcatcagatggagagggaagagctgggattagatgtgtttgtcgattgggcatgg

SEQ ID NO: 102716 - DNA, 80 bp, synthetic construct
  source 1..80: mol_type = other DNA
agtcaaaggattgggttgtggatatgttaaatgctatggtgtgtttatttggagttagagcttataagagaccatgccag

SEQ ID NO: 102717 - DNA, 80 bp, synthetic construct
  source 1..80: mol_type = other DNA
accagttgtgtgactcatgtaggtgacatagtttctttaaacaatggtttcccctctttgtaaaatgcagcttaaatatt

SEQ ID NO: 102718 - DNA, 80 bp, synthetic construct; identical to SEQ ID NO: 19687
  source 1..80: mol_type = other DNA

SEQ ID NO: 102719 - DNA, 80 bp, synthetic construct
  source 1..80: mol_type = other DNA
tccctttgcatatatgttgaagcctgcccctcctttccaaatagtcttcttgatttcatgttgataatttcagttcaact

SEQ ID NO: 102720 - DNA, 80 bp, synthetic construct
  source 1..80: mol_type = other DNA
cagtaggcagcatggagctgaagggatgttgcttaagaaaaaactatttgtgttggttatactgggattgagcaattatt

SEQ ID NO: 102721 - DNA, 80 bp, synthetic construct
  source 1..80: mol_type = other DNA
ccggaagcagcctttatttatttgttatcagtctgtactgggggagacatgcataatgatcatctaaaaatatacttttt

SEQ ID NO: 102722 - DNA, 80 bp, synthetic construct
  source 1..80: mol_type = other DNA
ttaaataactaaagtccaatttactttgttaggagacatagtggaaactattaaggagatggccagaaaagatgtttact

SEQ ID NO: 102723 - DNA, 80 bp, synthetic construct; identical to SEQ ID NO: 19688
  source 1..80: mol_type = other DNA

SEQ ID NO: 102724 - DNA, 80 bp, synthetic construct
  source 1..80: mol_type = other DNA
cagcatcattattgttttaagttacttgagatttttttccgaaagacaaatcgctctaaaatgactagtagacaacttgt

SEQ ID NO: 102725 - DNA, 80 bp, synthetic construct
  source 1..80: mol_type = other DNA
ttcaattagtgagatagaatgagttaaagagaagcaagtctggtagttgggaagggatgtgtcagtatcccttgtcaatc

SEQ ID NO: 102726 - DNA, 80 bp, synthetic construct; identical to SEQ ID NO: 19689
  source 1..80: mol_type = other DNA

SEQ ID NO: 102727 - DNA, 80 bp, synthetic construct
  source 1..80: mol_type = other DNA
gaatataataaaatatcaacaaaggcatttcctttatgtgcacatagacttatttatggatttgatatgcactatgtgaa

SEQ ID NO: 102728 - DNA, 80 bp, synthetic construct
  source 1..80: mol_type = other DNA
aaaaacaggtttgcaatgtcgaaactttttattgattcaataagaatgtgtagaatgactatgattttctgggtgctggg

SEQ ID NO: 102729 - DNA, 80 bp, synthetic construct
  source 1..80: mol_type = other DNA
gatgaaatgcattaggtgatgataagagctaaggagaaaaataatgcatggaaggggatggagagtgttcatgtgtgtgg

SEQ ID NO: 102730 - DNA, 80 bp, synthetic construct
  source 1..80: mol_type = other DNA
gcaggccaattaagtcatagtttctgacagtatctggaaataaatgctacatttgcttcccaaaatgtgactcagcagga

SEQ ID NO: 102731 - DNA, 80 bp, synthetic construct; identical to SEQ ID NO: 19690
  source 1..80: mol_type = other DNA

SEQ ID NO: 102732 - DNA, 80 bp, synthetic construct
  source 1..80: mol_type = other DNA
gtcagtacataaaggagagctactttctgctctttgcctcttctcctttgggagagattcgctttttaccccaaacttaa

SEQ ID NO: 102733 - DNA, 80 bp, synthetic construct
  source 1..80: mol_type = other DNA
tttgagctgttggatcttggcaaaaatgaaaaacaatgagacatttgatgcatttagagtatatgaatagaaaaacagac

SEQ ID NO: 102734 - DNA, 80 bp, synthetic construct
  source 1..80: mol_type = other DNA
ttccagatgcctttatggttgtattgtgttctgcaaagcaatggtaacaacatgtattttgttgtttttctgctctagtc

SEQ ID NO: 102735 - DNA, 80 bp, synthetic construct; identical to SEQ ID NO: 19691
  source 1..80: mol_type = other DNA

SEQ ID NO: 102736 - DNA, 80 bp, synthetic construct
  source 1..80: mol_type = other DNA
aattcttttaatatttattgagggacttgtatagcccagacatctttggcatgtgctgggtatgaaaacatgtctaaggc

SEQ ID NO: 102737 - DNA, 80 bp, synthetic construct
  source 1..80: mol_type = other DNA
atggcagaaggcgaatgggaaggaggcatgttttacgtggctggaggaggagcaagagagcaaaggggaagtgctacaca

SEQ ID NO: 102738 - DNA, 80 bp, synthetic construct
  source 1..80: mol_type = other DNA
ccatcttttaagatctcaacaacactatattcaggatgaagtgaatgttaatctgggagaagccatttataattttggta

SEQ ID NO: 102739 - DNA, 80 bp, synthetic construct; identical to SEQ ID NO: 19692
  source 1..80: mol_type = other DNA

SEQ ID NO: 102740 - DNA, 80 bp, synthetic construct
  source 1..80: mol_type = other DNA
gcaagctctgcctcccgggttcatgccattctcctgcctcatcctcccaagtagctgggactacaggcacccgccaccac

SEQ ID NO: 102741 - DNA, 80 bp, synthetic construct
  source 1..80: mol_type = other DNA
cccacactttcacttcccgcatcccatagtgccactgatcacacgtgttggtctgcatattcatctcttccattcagttt

SEQ ID NO: 102742 - DNA, 80 bp, synthetic construct; identical to SEQ ID NO: 19693
  source 1..80: mol_type = other DNA

SEQ ID NO: 102743 - DNA, 80 bp, synthetic construct
  source 1..80: mol_type = other DNA
ctggaccaatagaataggaatctgaacgttgataacagtgatttaaaacaaaagcatttttggggttgtggatatctttg

SEQ ID NO: 102744 - DNA, 80 bp, synthetic construct
  source 1..80: mol_type = other DNA
tttgagacttggcagaaagctcaagttttctgcaaggcatctctcttcctgactctcagtccccaaagactaaatctaag

SEQ ID NO: 102745 - DNA, 80 bp, synthetic construct
  source 1..80: mol_type = other DNA
aaatctaattccaaatagatcacagacttaaatatgaagcacatacttttaggaaaacaaacataaaagttttaagggaa

SEQ ID NO: 102746 - DNA, 80 bp, synthetic construct
  source 1..80: mol_type = other DNA
agaccagcctggccaacatggcaaaaccctgtctccattaaaaaatacacaaattagccagctgcttgggtggctgagac

SEQ ID NO: 102747 - DNA, 80 bp, synthetic construct; identical to SEQ ID NO: 19694
  source 1..80: mol_type = other DNA

SEQ ID NO: 102748 - DNA, 80 bp, synthetic construct
  source 1..80: mol_type = other DNA
caaagattatttaatctgcaacttgttaaaggagcaatgctttgcctaaaaatttggagtcagcagaaagtaatgtttaa

SEQ ID NO: 102749 - DNA, 80 bp, synthetic construct
  source 1..80: mol_type = other DNA
ccattctcctgcctcagcctcccgagtagctgggactacaggcacccaccaccacatctggctaattttttgtattttta

SEQ ID NO: 102750 - DNA, 80 bp, synthetic construct; identical to SEQ ID NO: 19695
  source 1..80: mol_type = other DNA

SEQ ID NO: 102751 - DNA, 80 bp, synthetic construct
  source 1..80: mol_type = other DNA
attgaatctcatcaacaggagaaagtgtgttttgctctgtaaaaatccacgtggagagggtaaaaagacaagctacagac

SEQ ID NO: 102752 - DNA, 80 bp, synthetic construct
  source 1..80: mol_type = other DNA
gaccacaatgagataacactgtatgcttatcagaatgactcaaacaaaaatattgacagccacgtgctggtgagaatgca

SEQ ID NO: 102753 - DNA, 80 bp, synthetic construct
  source 1..80: mol_type = other DNA
cacaaatacttggtgtagagcaactttatttgtaataatcgaaacatggaatcagctgtggtatgtccatagcgtgggat

SEQ ID NO: 102754 - DNA, 80 bp, synthetic construct
  source 1..80: mol_type = other DNA
aggagttcaagaccagcccaaccaacatggtaaaaccctgtctctattaaaaatgcaaaaaattagctgggcatggtggc

SEQ ID NO: 102755 - DNA, 80 bp, synthetic construct; identical to SEQ ID NO: 19696
  source 1..80: mol_type = other DNA

SEQ ID NO: 102756 - DNA, 80 bp, synthetic construct
  source 1..80: mol_type = other DNA
tggtgaacccagtgttggatataaaatactccaggaataaatgctgagtgccatgaagtaaaaccagtactcaggaaaaa

SEQ ID NO: 102757 - DNA, 80 bp, synthetic construct
  source 1..80: mol_type = other DNA
caatctgagctgactccattggctacttgtacatattttcctaaatatagtgggggaggggaggggaggtacagaagtgg

SEQ ID NO: 102758 - DNA, 80 bp, synthetic construct; identical to SEQ ID NO: 19697
  source 1..80: mol_type = other DNA

SEQ ID NO: 102759 - DNA, 80 bp, synthetic construct
  source 1..80: mol_type = other DNA
agtgatctcaattttttaaggcattcatagagactggacaaagagcaaagatttctggggtcccctttcgggataccaag

SEQ ID NO: 102760 - DNA, 80 bp, synthetic construct
  source 1..80: mol_type = other DNA
tgtaaagagagaccctgaatataggagatctagcaagcaaattggtcctgcccaatatctgatattaaggtactgcttta

SEQ ID NO: 102761 - DNA, 80 bp, synthetic construct
  source 1..80: mol_type = other DNA
actcccactgagaaaaactaataaaggtagacactctcctttcccccgaaagtagagagtgaacaaagcagtgaagatgt

SEQ ID NO: 102762 - DNA, 80 bp, synthetic construct; identical to SEQ ID NO: 19698
  source 1..80: mol_type = other DNA

SEQ ID NO: 102763 - DNA, 80 bp, synthetic construct
  source 1..80: mol_type = other DNA
tatggccctcgtctgtcaattctgcaagaagcaaaagtaaacctttagggagaaaattacatataaaactcaaattgcct

SEQ ID NO: 102764 - DNA, 80 bp, synthetic construct
  source 1..80: mol_type = other DNA
tcagataccaatcacaaatgggatccccagaccacttgcggttctgaccaactggctatacatttagaggttcccataat

SEQ ID NO: 102765 - DNA, 80 bp, synthetic construct
  source 1..80: mol_type = other DNA
tggaattaggatattttaccctcttagcacataaatgtgttcactatccaggatgcttccttgagcttcagtgcccagaa

SEQ ID NO: 102766 - DNA, 80 bp, synthetic construct; identical to SEQ ID NO: 19699
  source 1..80: mol_type = other DNA

SEQ ID NO: 102767 - DNA, 80 bp, synthetic construct
  source 1..80: mol_type = other DNA
agatattagacacacagataatggagtttaattaaaaatatttatgattatctggtggggtacagtgtttctataatctc

SEQ ID NO: 102768 - DNA, 80 bp, synthetic construct
  source 1..80: mol_type = other DNA
gtcactgcactccagtctgggtggcagagcaagaccctatctcttaaaaaaaaaagaaaaaaaaatatatatatgtatga

SEQ ID NO: 102769 - DNA, 80 bp, synthetic construct
  source 1..80: mol_type = other DNA
ctggaaatcagatcagaagactattcagactaaaacactgacagtcaaaagattgggaaacaggctgggcttggtgtcac

SEQ ID NO: 102770 - DNA, 80 bp, synthetic construct; identical to SEQ ID NO: 19700
  source 1..80: mol_type = other DNA

SEQ ID NO: 102771 - DNA, 80 bp, synthetic construct
  source 1..80: mol_type = other DNA
gaaagatggatggagggagacaaagagaactcacaggtgcgtggagtaaaggaagtatttaatacaattgcttgaaagtt

SEQ ID NO: 102772 - DNA, 80 bp, synthetic construct
  source 1..80: mol_type = other DNA
gcaagagtaagatttgcagttgatttcaactcagaaacaatgggagacatgggatgtaagcttaaaagtgcttaaagaaa

SEQ ID NO: 102773 - DNA, 80 bp, synthetic construct
  source 1..80: mol_type = other DNA
gtctcctgagtagctaggactatatgcgtgtgccaccatgcctggctaatgtttaaattttttgtaaagacagtatccca

SEQ ID NO: 102774 - DNA, 80 bp, synthetic construct; identical to SEQ ID NO: 19701
  source 1..80: mol_type = other DNA

SEQ ID NO: 102775 - DNA, 80 bp, synthetic construct
  source 1..80: mol_type = other DNA
tgggtggattgctccagtctaggagttcaagaccagcctgggaaacatggcgaaaccccatctctacaaaaaatacaaaa

SEQ ID NO: 102776 - DNA, 80 bp, synthetic construct
  source 1..80: mol_type = other DNA
caaaaaattatagagaacaactcattacaacactggcacatgagtcaaggggaaagtaacttgaattaaatggtggttct

SEQ ID NO: 102777 - DNA, 80 bp, synthetic construct
  source 1..80: mol_type = other DNA
ggaaatgagaataagaaacctggagtaggacaaatattaagaagaccaaattctgatgtggcctcgagattctcacccca

SEQ ID NO: 102778 - DNA, 80 bp, synthetic construct; identical to SEQ ID NO: 19702
  source 1..80: mol_type = other DNA

SEQ ID NO: 102779 - DNA, 80 bp, synthetic construct
  source 1..80: mol_type = other DNA
aataaggccttcagtcataaaactgcaaggcactgaattctgggaaccactggtgagctcctataagggcctgagctcca

SEQ ID NO: 102780 - DNA, 80 bp, synthetic construct
  source 1..80: mol_type = other DNA
atagactaccaaaacattctgtgtgacatcaccttgggaatgaggacatatagtaaaggactgaccctaaattgtagaga

SEQ ID NO: 102781 - DNA, 80 bp, synthetic construct
  source 1..80: mol_type = other DNA
atgcagttctcccctcaaatatatccacaaatggaatgcccttgaaacaaaatgttttcattcttttctttcttatagcc

SEQ ID NO: 102782 - DNA, 80 bp, synthetic construct; identical to SEQ ID NO: 19703
  source 1..80: mol_type = other DNA

SEQ ID NO: 102783 - DNA, 80 bp, synthetic construct
  source 1..80: mol_type = other DNA
tgtgatttgagggttctgttgtgctgttgctttcagattaatatccaaagtctttatctttaactcctttttatccttgt

SEQ ID NO: 102784 - DNA, 80 bp, synthetic construct
  source 1..80: mol_type = other DNA
ctcatatcctcattcttttctttgcatgctgaattcttactcagctccaggagtgaacccaaatatctccctcatgaaaa

SEQ ID NO: 102785 - DNA, 80 bp, synthetic construct
  source 1..80: mol_type = other DNA
tactacctaggctagtttttggtgttcgtgtctttcttaccatgtcaaactgtacattcgtggatacaggaactttggtg

SEQ ID NO: 102786 - DNA, 80 bp, synthetic construct
  source 1..80: mol_type = other DNA
acatttacacatacacatttgtagctctccatccttctcttttaaagagaataatccaagtttatttgagatagcctggt

SEQ ID NO: 102787 - DNA, 80 bp, synthetic construct; identical to SEQ ID NO: 19704
  source 1..80: mol_type = other DNA

SEQ ID NO: 102788 - DNA, 80 bp, synthetic construct
  source 1..80: mol_type = other DNA
tcacacacaataatttcactgctctcaaaattccctgttccccatttattccttcttccctcccctgaactcctgaaaaa

SEQ ID NO: 102789 - DNA, 80 bp, synthetic construct
  source 1..80: mol_type = other DNA
gaaaaacattccaatggatgtgttacagtttattcacattttggctgcttccaagttgtggtaattaaaagctactatta

SEQ ID NO: 102790 - DNA, 80 bp, synthetic construct; identical to SEQ ID NO: 19705
  source 1..80: mol_type = other DNA

SEQ ID NO: 102791 - DNA, 80 bp, synthetic construct
  source 1..80: mol_type = other DNA
tggagtgcagtggcatgatctcggcttactggaagctcaatctcctgggttcacgccattctcctgcctcagcctccaga

SEQ ID NO: 102792 - DNA, 80 bp, synthetic construct
  source 1..80: mol_type = other DNA
tacatatttcggatgccagtcctttcccagatatgcgattgcaaatattgtctttcagtctctggcttgtctttttattc

SEQ ID NO: 102793 - DNA, 80 bp, synthetic construct
  source 1..80: mol_type = other DNA
gttctctgtgttacatttaggcctatggttcattttgacctaaatttagtggaaggtgtcaggtgtgttctagattagtt

SEQ ID NO: 102794 - DNA, 80 bp, synthetic construct; identical to SEQ ID NO: 19706
  source 1..80: mol_type = other DNA

SEQ ID NO: 102795 - DNA, 80 bp, synthetic construct
  source 1..80: mol_type = other DNA
tttgaaactatagatcaaattgggaagaactgatgtcttgaaatattgagtcttcctatccatgaacatggaatagctct

SEQ ID NO: 102796 - DNA, 80 bp, synthetic construct
  source 1..80: mol_type = other DNA
atagaagaaattgatttttgtgtattaatgtcctgaaactttcctataattgtctattagtttcaggagatttttgttgt

SEQ ID NO: 102797 - DNA, 80 bp, synthetic construct; identical to SEQ ID NO: 19707
  source 1..80: mol_type = other DNA

SEQ ID NO: 102798 - DNA, 80 bp, synthetic construct
  source 1..80: mol_type = other DNA
ttcagtgatatcttaattaccttatgtatacaaaaggagaaaatattcatttttgctatcatacttgtattcaaacagca

SEQ ID NO: 102799 - DNA, 80 bp, synthetic construct
  source 1..80: mol_type = other DNA
tttggataaatgaagtagtattttattacttccctgcattgcagtaactaaaatacattgatatggcttcttctttgtcc

SEQ ID NO: 102800 - DNA, 80 bp, synthetic construct
  source 1..80: mol_type = other DNA
ggtgttcagtatttgttatatactctaccctttttcttgacaaaaaatgaaaccagaatgttatgtattcagaaaatagg

SEQ ID NO: 102801 - DNA, 80 bp, synthetic construct; identical to SEQ ID NO: 19708
  source 1..80: mol_type = other DNA

SEQ ID NO: 102802 - DNA, 80 bp, synthetic construct
  source 1..80: mol_type = other DNA
tccagctagctttctctgagattaaaatgaccaataatatgggtagaatattctagatctaaggtcaaccaatcaaggca

SEQ ID NO: 102803 - DNA, 80 bp, synthetic construct
  source 1..80: mol_type = other DNA
gttttaaaccaccctttcatggtggcaatgaaagtcatagtggtgggtgtcaagtccaacagttctcgagacagtggatc

SEQ ID NO: 102804 - DNA, 80 bp, synthetic construct
  source 1..80: mol_type = other DNA
gatgcatacacaatagaatattatacaacctttaaaaagaaggcaatcctgtcatttgcaacaacatggatgaacctgga

SEQ ID NO: 102805 - DNA, 80 bp, synthetic construct; identical to SEQ ID NO: 19709
  source 1..80: mol_type = other DNA

SEQ ID NO: 102806 - DNA, 80 bp, synthetic construct
  source 1..80: mol_type = other DNA
agtgactgatttatgatgaagctattaataggtaggcttcatttcctagttacgttgtcccgagcgattttataatttag

SEQ ID NO: 102807 - DNA, 80 bp, synthetic construct
  source 1..80: mol_type = other DNA
cagagctgacatttgttgtgcaaggacttttccaagtggtctacgtgggttatattactcattcattcttcacagtaacc

SEQ ID NO: 102808 - DNA, 80 bp, synthetic construct
  source 1..80: mol_type = other DNA
gagtcatcaacttttagttgccctgcagaacaaacaagagagtaactgtgatgtcattggttgacagagccctgtggcag

SEQ ID NO: 102809 - DNA, 80 bp, synthetic construct
  source 1..80: mol_type = other DNA
gctatgaagaactcgtaaggatttgtgcttttattaatatgctaatgctagtcttttctgggccttagattctaaagatg

SEQ ID NO: 102810 - DNA, 80 bp, synthetic construct; identical to SEQ ID NO: 19710
  source 1..80: mol_type = other DNA

SEQ ID NO: 102811 - DNA, 80 bp, synthetic construct
  source 1..80: mol_type = other DNA
gtaggcataacttacagccttaagtctggaatttttcaaagtactgttgaacaagctcatactgctggttattatatgtg

SEQ ID NO: 102812 - DNA, 80 bp, synthetic construct
  source 1..80: mol_type = other DNA
cattgcaaaaatagtctccagttaacaaagagctgcatgagctcttttgtattttcatatccgtcgaccttcctgaattc

SEQ ID NO: 102813 - DNA, 80 bp, synthetic construct
  source 1..80: mol_type = other DNA
gttcaaagttggtaataccatttggcaaacttgttggtctttagaacaattgtcctcctagactctgatttgatacttga

SEQ ID NO: 102814 - DNA, 80 bp, synthetic construct; identical to SEQ ID NO: 19711
  source 1..80: mol_type = other DNA

SEQ ID NO: 102815 - DNA, 80 bp, synthetic construct
  source 1..80: mol_type = other DNA
aatatgaagaggaacaattcagggcacaagaaccttcaagatagagctaaaaatatttcaggtaggaaggaggattcaac

SEQ ID NO: 102816 - DNA, 80 bp, synthetic construct
  source 1..80: mol_type = other DNA
atatattattcatgctatttgtatcttagagaccttttaaaaatgttttgaacttaatttctgtataccttattacctta

SEQ ID NO: 102817 - DNA, 80 bp, synthetic construct
  source 1..80: mol_type = other DNA
ttattgaacagtatatcattgagtttcttcctctattttctgttggtttattttgttctctatatgtcttcaggcaattc

SEQ ID NO: 102818 - DNA, 80 bp, synthetic construct
  source 1..80: mol_type = other DNA
tttcttcattttccaagttgtcaatttcttttcttttcagtatttgtttctaatttttttgtttatgatcagaaaatacg

SEQ ID NO: 102819 - DNA, 80 bp, synthetic construct; identical to SEQ ID NO: 19712
  source 1..80: mol_type = other DNA

SEQ ID NO: 102820 - DNA, 80 bp, synthetic construct
  source 1..80: mol_type = other DNA
aagatgtggtcacttagaaactctggggatgggtccagcaatctctttttaaaaaattattttaattagcacataattgt

SEQ ID NO: 102821 - DNA, 80 bp, synthetic construct
  source 1..80: mol_type = other DNA
tatttgaaaatatatgctaagttgttaactatggtcatgctatagtgctatcaaatactagaacctatctctccaatcta

SEQ ID NO: 102822 - DNA, 80 bp, synthetic construct
  source 1..80: mol_type = other DNA
ctacactgagggtgattttgtccccaaagggacatctgacaatgttggagaactcttagaactcttttggttgtcacagc

SEQ ID NO: 102823 - DNA, 80 bp, synthetic construct; identical to SEQ ID NO: 19713
  source 1..80: mol_type = other DNA

SEQ ID NO: 102824 - DNA, 80 bp, synthetic construct
  source 1..80: mol_type = other DNA
taggtcctaatggatggattagggtgatcccaaactaactgattaaattttatctaaagaaatagacaattatgtacccc

SEQ ID NO: 102825 - DNA, 80 bp, synthetic construct
  source 1..80: mol_type = other DNA
aacaccataggaaggctgttggccaaatctagaatgtagaaagtcctccaggacatatggtacagactgattatcaccaa

SEQ ID NO: 102826 - DNA, 80 bp, synthetic construct
  source 1..80: mol_type = other DNA
tgtatctcttttggaactggatttgaaaaagcaacaggggaaaattaaaaacatctgtgaggcaatttgggaagttcaaa

SEQ ID NO: 102827 - DNA, 80 bp, synthetic construct
  source 1..80: mol_type = other DNA
atttgaaacattccacaataaagatagaatgagaaggattatctaaacaggtagggaacggcaggtgagaatggtgttag

SEQ ID NO: 102828 - DNA, 80 bp, synthetic construct; identical to SEQ ID NO: 19714
  source 1..80: mol_type = other DNA

SEQ ID NO: 102829 - DNA, 80 bp, synthetic construct
  source 1..80: mol_type = other DNA
catattaacacattattttgagggttttggaatttgggtgcatgtgatatgcatccaaagaaattccttttttgtgactt

SEQ ID NO: 102830 - DNA, 80 bp, synthetic construct
  source 1..80: mol_type = other DNA
cctaaacttatcacagagtactttcatggacctaagttagatgagtaaggtgaaatctattcactgggagggagggatgg

SEQ ID NO: 102831 - DNA, 80 bp, synthetic construct
  source 1..80: mol_type = other DNA
actgtctcctgccaaaaaagtataactttaactgtttactcacaggccatttgcttttctctcctaattagcttcaaaaa

SEQ ID NO: 102832 - DNA, 80 bp, synthetic construct; identical to SEQ ID NO: 19715
  source 1..80: mol_type = other DNA

SEQ ID NO: 102833 - DNA, 80 bp, synthetic construct
  source 1..80: mol_type = other DNA
tagcctcagttcaccagctagcaaacctgagaaataagcaataattttgtacagtctgcttttgtctttagcctcatttg

SEQ ID NO: 102834 - DNA, 80 bp, synthetic construct
  source 1..80: mol_type = other DNA
tctgacagactgtggatttaaccttctaaaagtacatttaaaacaggaaacttgaacatgagcgtaggacagagtcatta

SEQ ID NO: 102835 - DNA, 80 bp, synthetic construct
  source 1..80: mol_type = other DNA
tctgaatatttccttttagttcctgtaaatgaatacaatatgatgataaaggtgtcattttgaactattttaagtagaat

SEQ ID NO: 102836 - DNA, 80 bp, synthetic construct; identical to SEQ ID NO: 19716
  source 1..80: mol_type = other DNA

SEQ ID NO: 102837 - DNA, 80 bp, synthetic construct
  source 1..80: mol_type = other DNA
aggcacctgccaccacgcccagctaatttgttgtatttttagtagagacagggtttaaccgtgttagccaggatggtctc

SEQ ID NO: 102838 - DNA, 80 bp, synthetic construct
  source 1..80: mol_type = other DNA
cgtttctgctcctgtgtcccatgcaatgattttgaaaaactttgtccattcttgaacactgtgaggttgacatagaaatc

SEQ ID NO: 102839 - DNA, 80 bp, synthetic construct
  source 1..80: mol_type = other DNA
acaataaaaatatatattattcagtctttccttttcactacatcctactcctctgcaacaaaaatatttatataaattta

SEQ ID NO: 102840 - DNA, 80 bp, synthetic construct; identical to SEQ ID NO: 19717
  source 1..80: mol_type = other DNA

SEQ ID NO: 102841 - DNA, 80 bp, synthetic construct
  source 1..80: mol_type = other DNA
ctataagtgcagtttcgagaggttgtattgaccttgtaaaacagattgaatatgtgttttcaaaatttagagacatacct

SEQ ID NO: 102842 - DNA, 80 bp, synthetic construct
  source 1..80: mol_type = other DNA
ataaatctagattattcttcaaacttctgaattaagtagtcttgatcctgtctctctactgttgcttatgtttgtatttt

SEQ ID NO: 102843 - DNA, 80 bp, synthetic construct
  source 1..80: mol_type = other DNA
gtcactgaggggaataccacagagaaggcagagcaggtagtttttcaaccatttagcagcttaaagagagatgttttgtt

SEQ ID NO: 102844 - DNA, 80 bp, synthetic construct
  source 1..80: mol_type = other DNA
cagtttaggagcttttatttttttaattaaatccctttcattctaggaagtttacatgtcttatatgcaatggccacata

SEQ ID NO: 102845 - DNA, 80 bp, synthetic construct; identical to SEQ ID NO: 19718
  source 1..80: mol_type = other DNA

SEQ ID NO: 102846 - DNA, 80 bp, synthetic construct
  source 1..80: mol_type = other DNA
tagggatattgtaagtgagatatgtgttagttcctgtaataggaatactcatggaaataaaaactatgaattacatagag

SEQ ID NO: 102847 - DNA, 80 bp, synthetic construct
  source 1..80: mol_type = other DNA
aaaactccattactattgccaattttagtttttactacatatgattttcttgccttgccctctcatttgggaggaggtgg

SEQ ID NO: 102848 - DNA, 80 bp, synthetic construct; identical to SEQ ID NO: 19719
  source 1..80: mol_type = other DNA

SEQ ID NO: 102849 - DNA, 80 bp, synthetic construct
  source 1..80: mol_type = other DNA
ccaaatatttcattgtttttcaaataatggaaacaaatattaaacataattgtgaccgggcacagggtggctcacgcctg

SEQ ID NO: 102850 - DNA, 80 bp, synthetic construct
  source 1..80: mol_type = other DNA
ctagagaatcgcttgaacccgggaggcggagtttacagtgagccaagatcgcgccactgtactccagcctgggtgacaga

SEQ ID NO: 102851 - DNA, 80 bp, synthetic construct
  source 1..80: mol_type = other DNA
taacaaactttaatttcatcttaagacaataccgtgttatctggttttattagtatacggttattaacttaattgggggg

SEQ ID NO: 102852 - DNA, 80 bp, synthetic construct
  source 1..80: mol_type = other DNA
accaagtactctcaatttgtagaacacaaacatttttaataagtctgtatgaacccaagtttattaaataataagattat

SEQ ID NO: 102853 - DNA, 80 bp, synthetic construct; identical to SEQ ID NO: 19720
  source 1..80: mol_type = other DNA

SEQ ID NO: 102854 - DNA, 80 bp, synthetic construct
  source 1..80: mol_type = other DNA
tgtgccatcactctgcaccttagcatggttaaagctcctaaatacacaaccttcagttaacaaggtaatgtgcaaagcaa

SEQ ID NO: 102855 - DNA, 80 bp, synthetic construct
  source 1..80: mol_type = other DNA
aacgtttatcatttctgcgcattaacaacattcagtatccttcaaagcaaatttttaatgatcataacttatcattttac

SEQ ID NO: 102856 - DNA, 80 bp, synthetic construct
  source 1..80: mol_type = other DNA
atagtctaactatagacttcagtttatatatatgagttccaattaatcatacttagacgttgaccacaatactactgttt

SEQ ID NO: 102857 - DNA, 80 bp, synthetic construct; identical to SEQ ID NO: 19721
  source 1..80: mol_type = other DNA

SEQ ID NO: 102858 - DNA, 80 bp, synthetic construct
  source 1..80: mol_type = other DNA
atgttttaatagctactccttctgtgattgtgggtgctattggatcaagtcctaactgttttcattaggtggagtggaag

SEQ ID NO: 102859 - DNA, 80 bp, synthetic construct
  source 1..80: mol_type = other DNA
agcatttaccttccggtcttccaaggtgagacagaaaatattttgggtttcctataaatgttacccggtcatatttcctt

SEQ ID NO: 102860 - DNA, 80 bp, synthetic construct
  source 1..80: mol_type = other DNA
aaagggtaatgattacataaagggtaatgattgcataaatcatactgtatacatacatattgggatagtatgaagctgtc

SEQ ID NO: 102861 - DNA, 80 bp, synthetic construct; identical to SEQ ID NO: 19722
  source 1..80: mol_type = other DNA

SEQ ID NO: 102862 - DNA, 80 bp, synthetic construct
  source 1..80: mol_type = other DNA
ggggaagcaggcaggtcttacatggaggcaggtgagagagagagcaggagagtgagtgtgaaggagaaagcgtcaaacac

SEQ ID NO: 102863 - DNA, 80 bp, synthetic construct
  source 1..80: mol_type = other DNA
catatttctgttcataatttaatgaagattgtgaaacttgggaaagatgattggaacaatattaaactactaactagctt

SEQ ID NO: 102864 - DNA, 80 bp, synthetic construct; identical to SEQ ID NO: 19723
  source 1..80: mol_type = other DNA

SEQ ID NO: 102865 - DNA, 80 bp, synthetic construct
  source 1..80: mol_type = other DNA
aaatcttctaaatattttacaagcattaacaaatgattatttcctatttaggtaaagcgtttaccctaaaagaccaattt

SEQ ID NO: 102866 - DNA, 80 bp, synthetic construct
  source 1..80: mol_type = other DNA
cagtaggtctatggcctggattgctccagtgagtgcaggaaatagagaacattaattttgctaattatgaaaataaacta

SEQ ID NO: 102867 - DNA, 80 bp, synthetic construct
  source 1..80: mol_type = other DNA
aaagcagtacatgttggtctttgaaagtttagaaaatacaaaaaaaagtaggagtaagaactacctaattatgcagaata

SEQ ID NO: 102868 - DNA, 80 bp, synthetic construct; identical to SEQ ID NO: 19724
  source 1..80: mol_type = other DNA

SEQ ID NO: 102869 - DNA, 80 bp, synthetic construct
  source 1..80: mol_type = other DNA
agatcgtgccactgcagtccagcctgggcgatagagcaagactctgtctcaaaaaaaaaaagctataaggaagataaaat

SEQ ID NO: 102870 - DNA, 80 bp, synthetic construct
  source 1..80: mol_type = other DNA
agtccaaatacatgtcgttcaagaatcaactgtacattacaaaatatgactatagtttggtgttctgctttcatttgagg

SEQ ID NO: 102871 - DNA, 80 bp, synthetic construct
  source 1..80: mol_type = other DNA
atatatattattataaataaaactcaaaccaaaataaggtgtggggagaccagaagtaattctgaaaagacagtatcctg

SEQ ID NO: 102872 - DNA, 80 bp, synthetic construct
  source 1..80: mol_type = other DNA
ctttattctccattgtgaaaatagagaggcacagctggtaaaacctcattatccttgcaaagcatctgtatctatatatt

SEQ ID NO: 102873 - DNA, 80 bp, synthetic construct; identical to SEQ ID NO: 19725
  source 1..80: mol_type = other DNA

SEQ ID NO: 102874 - DNA, 80 bp, synthetic construct
  source 1..80: mol_type = other DNA
atgaaccggtacatcacagtggaagacattggaatgatttgccaaatttgagtattttaaaaagctgggagtctgtggtg

SEQ ID NO: 102875 - DNA, 80 bp, synthetic construct
  source 1..80: mol_type = other DNA
aggaagagtgaaaggtacggtaggtgctccagttgccttctatgaaacaaacatcaaagatcttcttaagattgaaaact

SEQ ID NO: 102876 - DNA, 80 bp, synthetic construct; identical to SEQ ID NO: 19726
  source 1..80: mol_type = other DNA

SEQ ID NO: 102877 - DNA, 80 bp, synthetic construct
  source 1..80: mol_type = other DNA
cattaagaggcacatctaaaacaactttatttggaaagattggaaataaaaagatggctagtggaataccaagaaaatac

SEQ ID NO: 102878 - DNA, 80 bp, synthetic construct
  source 1..80: mol_type = other DNA
aatacaaaaattagctaggcgtggtggcatgcacctgtaatcccagctgcttgggaggctgagggaggagaattgcctga

SEQ ID NO: 102879 - DNA, 80 bp, synthetic construct; identical to SEQ ID NO: 19727
  source 1..80: mol_type = other DNA

SEQ ID NO: 102880 - DNA, 80 bp, synthetic construct
  source 1..80: mol_type = other DNA
ttgttgttgggaatataaattagctcaaccattgtggacgacagtgtggtgattcctcaaggatctagaaccagaaatac

SEQ ID NO: 102881 - DNA, 80 bp, synthetic construct; identical to SEQ ID NO: 19728
  source 1..80: mol_type = other DNA

SEQ ID NO: 102882 - DNA, 80 bp, synthetic construct
  source 1..80: mol_type = other DNA
agcatcaggactaatagctaatgcatgtggggcgtaaaacctagatgatgggttgataggtgccgcaaaccaccatggca

SEQ ID NO: 102883 - DNA, 80 bp, synthetic construct
  source 1..80: mol_type = other DNA
gaggagaaacaaacagaaaatcttagtattaggagatatcaagtcaccttttctcagttcatgatacgcacacacaccac

SEQ ID NO: 102884 - DNA, 80 bp, synthetic construct; identical to SEQ ID NO: 19729
  source 1..80: mol_type = other DNA

SEQ ID NO: 102885 - DNA, 80 bp, synthetic construct
  source 1..80: mol_type = other DNA
tatctctgcaccaaaacaactggccagggtggggtggttacatataactgggctgtagctttccaggctggctggttcac

SEQ ID NO: 102886 - DNA, 80 bp, synthetic construct
  source 1..80: mol_type = other DNA
tgtgtctaactgtgatctctcaaaatcctccctttcctgcagaaagctgaatagagtccatctttctcatttgattcttt

SEQ ID NO: 102887 - DNA, 80 bp, synthetic construct
  source 1..80: mol_type = other DNA
tgtggttgggggtgggagggtactgtcttagaaaaataaagtgaaaacttgtaggtaaaaatatacgtgcaagttaattt

SEQ ID NO: 102888 - DNA, 80 bp, synthetic construct; identical to SEQ ID NO: 19730
  source 1..80: mol_type = other DNA

SEQ ID NO: 102889 - DNA, 80 bp, synthetic construct
  source 1..80: mol_type = other DNA
gttgaatatgttatatacataatatatattgatctggagatatgtataacaatatattgatctggaaaaatatccatgaa

SEQ ID NO: 102890 - DNA, 80 bp, synthetic construct
  source 1..80: mol_type = other DNA
ttgtatatgattttatggtagttgtggaaggatatacactaatcatttaactcacagtattttagaaagatcaaaatgga

SEQ ID NO: 102891 - DNA, 80 bp, synthetic construct
  source 1..80: mol_type = other DNA
aaaaccattgcactgacattctgggacataagttctgtgcacatttttgatttgtttatttaggatggattcctacaaat

SEQ ID NO: 102892 - DNA, 80 bp, synthetic construct
  source 1..80: mol_type = other DNA
atagggctcatatttgaggacttttgactctccagatccttctgtgatttctgctcagggattctgtttctggaatttgg

SEQ ID NO: 102893 - DNA, 80 bp, synthetic construct; identical to SEQ ID NO: 19731
  source 1..80: mol_type = other DNA

SEQ ID NO: 102894 - DNA, 80 bp, synthetic construct
  source 1..80: mol_type = other DNA
tagtacaaagatggagaaaggagaaaagtaaatccatcactcagaaacaacctcttgtgtgtatttgagttgtaagcaaa

SEQ ID NO: 102895 - DNA, 80 bp, synthetic construct
  source 1..80: mol_type = other DNA
tgaatatttagcttattttcaatttttcacttttaagctgaatatttttatctctgaatatttctatatattgctgacta

SEQ ID NO: 102896 - DNA, 80 bp, synthetic construct
  source 1..80: mol_type = other DNA
atgcacctggccaaagtactcttcagaactttgcaccagtatttattctaagcagcagggtatgaaactttacatttctg

SEQ ID NO: 102897 - DNA, 80 bp, synthetic construct
  source 1..80: mol_type = other DNA
acaaatgccacagtaagcaatttttagcaaatggtcttttttttttattcatttcttggaacgcatgtggcttttacaag

SEQ ID NO: 102898 - DNA, 80 bp, synthetic construct; identical to SEQ ID NO: 19732
  source 1..80: mol_type = other DNA

SEQ ID NO: 102899 - DNA, 80 bp, synthetic construct
  source 1..80: mol_type = other DNA
cacttccaaattcttcgaaattctgctcatgtcctaacttgagctttctgtaatcatggttagtgtctttccaattaggg

SEQ ID NO: 102900 - DNA, 80 bp, synthetic construct
  source 1..80: mol_type = other DNA
tcactatcattatcatcagcatcattttcttaaagcaaattaatgcttctggataacttacttcctttagaatgcacaat

SEQ ID NO: 102901 - DNA, 80 bp, synthetic construct; identical to SEQ ID NO: 19733
  source 1..80: mol_type = other DNA

SEQ ID NO: 102902 - DNA, 80 bp, synthetic construct
  source 1..80: mol_type = other DNA
aaaaaataaatggcacagaaacacatatctaaaactacactcacatatacagacgtgaaaaattagagtaattgatagtg

SEQ ID NO: 102903 - DNA, 80 bp, synthetic construct
  source 1..80: mol_type = other DNA
agagaaaatagaatagctcaacagattcacttaatccctttgttagtcatcacatttgatcatggtctctgttctttaaa

SEQ ID NO: 102904 - DNA, 80 bp, synthetic construct
  source 1..80: mol_type = other DNA
aacatatatcttagaccttagatcttagacatgtatcttctaccatatttcccatgaagagtacttacattatgaaaggc

SEQ ID NO: 102905 - DNA, 80 bp, synthetic construct; identical to SEQ ID NO: 19734
  source 1..80: mol_type = other DNA

SEQ ID NO: 102906 - DNA, 80 bp, synthetic construct
  source 1..80: mol_type = other DNA
cattggggtgtctttgacagtaatgtgaacattcaccagccagtctcaaatacaggatttgagggaagaatcaacaattg

SEQ ID NO: 102907 - DNA, 80 bp, synthetic construct
  source 1..80: mol_type = other DNA
tagaagttgtaaccattgttttcaagtgtgttgaaatgtttgttttaatcataaggcaggtcttgccaatcatatgtgta

SEQ ID NO: 102908 - DNA, 80 bp, synthetic construct
  source 1..80: mol_type = other DNA
ttttcctccctgtgtacaatgaatagaagtcttttgctatggaaatgatggaataacagtttcaaataagactgtcaatg

SEQ ID NO: 102909 - DNA, 80 bp, synthetic construct
  source 1..80: mol_type = other DNA
tagctgggactataggcatgcaccatcacacccagcaaatttttgtagttttagtagagacggggtttcgccatgttgcc

SEQ ID NO: 102910 - DNA, 80 bp, synthetic construct; identical to SEQ ID NO: 19735
  source 1..80: mol_type = other DNA

SEQ ID NO: 102911 - DNA, 80 bp, synthetic construct
  source 1..80: mol_type = other DNA
ggcagaaccaaacttaactacatagtaagactaaaaccctctttagtaagaaaactaaagattttataaagaacttgtaa

SEQ ID NO: 102912 - DNA, 80 bp, synthetic construct
  source 1..80: mol_type = other DNA
aaattcagttatagttgtatgctggtcttttttaacgactgtaagaacgagaatgaacccattgaagccttctgtgatta

SEQ ID NO: 102913 - DNA, 80 bp, synthetic construct
  source 1..80: mol_type = other DNA
agagatgcagaaccagtggagatatgtatatattaaggcatttattatataggtttgcttaatgagattgtgagggctgg

SEQ ID NO: 102914 - DNA, 80 bp, synthetic construct; identical to SEQ ID NO: 19736
  source 1..80: mol_type = other DNA

SEQ ID NO: 102915 - DNA, 80 bp, synthetic construct
  source 1..80: mol_type = other DNA
aggcactgtgaccttaagctttgtggctacggctgtggaagcccctcatagaccccttcagcatgagaaactttaaaaat

SEQ ID NO: 102916 - DNA, 80 bp, synthetic construct
  source 1..80: mol_type = other DNA
ccacgtaacatttttagactttcttttcacagtgaccaactattctgggctgcagtgcggcaccataaaggagcaaataa

SEQ ID NO: 102917 - DNA, 80 bp, synthetic construct; identical to SEQ ID NO: 19737
  source 1..80: mol_type = other DNA

SEQ ID NO: 102918 - DNA, 80 bp, synthetic construct
  source 1..80: mol_type = other DNA
tcattatgagtcaggttggtatacccaatgccaaatattacttaatacttttcagaccaatcgtttttacatctgggtct

SEQ ID NO: 102919 - DNA, 80 bp, synthetic construct
  source 1..80: mol_type = other DNA
acaggcacccgccaccacgctcagctaattttttattttattttatttttagtagagatggggtttcaccgtgttagcca

SEQ ID NO: 102920 - DNA, 80 bp, synthetic construct
  source 1..80: mol_type = other DNA
gctcataatgggagtagtttgtcagcacagtttttatgggaaatctgaagggatttccagaaattcatcaaggatctgac

SEQ ID NO: 102921 - DNA, 80 bp, synthetic construct; identical to SEQ ID NO: 19738
  source 1..80: mol_type = other DNA

SEQ ID NO: 102922 - DNA, 80 bp, synthetic construct
  source 1..80: mol_type = other DNA
atcttgacattttcttgattaaatgtaggaggcataggaattaaattttatatagtcttttgaaggaggtttccatttaa

SEQ ID NO: 102923 - DNA, 80 bp, synthetic construct
  source 1..80: mol_type = other DNA
ctatttcatttatttttgtgatgtataatttagctctattcattatgtatgtgttttcctttatatttttgaacatattt

SEQ ID NO: 102924 - DNA, 80 bp, synthetic construct
  source 1..80: mol_type = other DNA
attggatattgggaatgatatgtagtagaggctctgaatttcaagtttttttctgaagagtgattttggttttgcaggca

SEQ ID NO: 102925 - DNA, 80 bp, synthetic construct; identical to SEQ ID NO: 19739
  source 1..80: mol_type = other DNA

SEQ ID NO: 102926 - DNA, 80 bp, synthetic construct
  source 1..80: mol_type = other DNA
atctacttttcaatttcttcctgcttttggtccaagtgcctttaagtcaattcttaaaaggattttttccaaattttata

SEQ ID NO: 102927 - DNA, 80 bp, synthetic construct
  source 1..80: mol_type = other DNA
cctaatctgagcactttatttccagtaatacaggctactattctgttggatgcttttactagatgtcacatttgttgttc

SEQ ID NO: 102928 - DNA, 80 bp, synthetic construct
  source 1..80: mol_type = other DNA
tgtaacttcagcattttttacctcactcaagggtcatagtaattattaaaacagtcatcggccgggagcggtggctcaca

SEQ ID NO: 102929 - DNA, 80 bp, synthetic construct
  source 1..80: mol_type = other DNA
tgagacagcagaattgcttggaaccaggaggctgaggttacagtgagctgagactgtgccactgcattccagcctgggtg

SEQ ID NO: 102930 - DNA, 80 bp, synthetic construct; identical to SEQ ID NO: 19740
  source 1..80: mol_type = other DNA

SEQ ID NO: 102931 - DNA, 80 bp, synthetic construct
  source 1..80: mol_type = other DNA
aggttatttgcataatgattgaatcaacttaattgataattatatattttcttagttgaccttgacattttgtgttaaaa

SEQ ID NO: 102932 - DNA, 80 bp, synthetic construct
  source 1..80: mol_type = other DNA
tactctgactgaatcttcaaaacattcgtttaactataattctaaataaaagtcataagaccaaagacatagaagacacg

SEQ ID NO: 102933 - DNA, 80 bp, synthetic construct; identical to SEQ ID NO: 19741
  source 1..80: mol_type = other DNA

SEQ ID NO: 102934 - DNA, 80 bp, synthetic construct
  source 1..80: mol_type = other DNA
gttattattgtcaaagttgtcaaaaaattttgaagtgtttatcccggggacactattctgaaatctacatgcattatctt

SEQ ID NO: 102935 - DNA, 80 bp, synthetic construct
  source 1..80: mol_type = other DNA
aacttgctaacatcttagaggtaatgagtggcagaggctggactcaaaattaaatctctctgtcccccaaatctatgctc

SEQ ID NO: 102936 - DNA, 80 bp, synthetic construct
  source 1..80: mol_type = other DNA
attcaagcataagttagaggtcgaactgttagagtaaaatatttggccattatttcaggggacttcagagggctgaattt

SEQ ID NO: 102937 - DNA, 80 bp, synthetic construct
  source 1..80: mol_type = other DNA
aagaagtagatggcatgggaacatctgaaataaaatacggtgactcagtatgctatatacaacatgtagacacaggccta

SEQ ID NO: 102938 - DNA, 80 bp, synthetic construct
  source 1..80: mol_type = other DNA
agttcataattttgcaagtgaaagggcagattccactgtaatagactctttagctttgtaaagtgaacagagttggatgt

SEQ ID NO: 102939 - DNA, 80 bp, synthetic construct; identical to SEQ ID NO: 19742
  source 1..80: mol_type = other DNA

SEQ ID NO: 102940 - DNA, 80 bp, synthetic construct
  source 1..80: mol_type = other DNA
ttcattactagactctgagattggaaccaagtctttgatttatgtatattcagcatctagcagagtgctgaaaccatagt

SEQ ID NO: 102941 - DNA, 80 bp, synthetic construct
  source 1..80: mol_type = other DNA
gtgaacacctaatgttgtcgaaattgtggcagaagaggttgatttggctttaaagcaaatttttcttttgataatgacgt

SEQ ID NO: 102942 - DNA, 80 bp, synthetic construct; identical to SEQ ID NO: 19743
  source 1..80: mol_type = other DNA

SEQ ID NO: 102943 - DNA, 80 bp, synthetic construct
  source 1..80: mol_type = other DNA
tctcagcttatttttttcctgtagcatcgagtttttaaaaaatccatgccagttatagaatgcctcatgttctggatgtg

SEQ ID NO: 102944 - DNA, 80 bp, synthetic construct
  source 1..80: mol_type = other DNA
ccatgaacttgcagctaggtataaggctgtgctgtccaaatcagtaactgctagacacatgtggcaatttggtatttgta

SEQ ID NO: 102945 - DNA, 80 bp, synthetic construct; identical to SEQ ID NO: 19744
  source 1..80: mol_type = other DNA

SEQ ID NO: 102946 - DNA, 80 bp, synthetic construct
  source 1..80: mol_type = other DNA
tctggtctgctggtttattatctcagcatattttcccattgtgaatttccactcctattttatcgaagtcgtaacttgca

SEQ ID NO: 102947 - DNA, 80 bp, synthetic construct
  source 1..80: mol_type = other DNA
ccagacctccaattattaaagagttcttaaattcacagagtaaaccctacttgaccatagtgtatgattcttttgaaatt

SEQ ID NO: 102948 - DNA, 80 bp, synthetic construct
  source 1..80: mol_type = other DNA
gggctatacggaaacaggtgatgtgctgtagtttgccaatccttggtctagactagtctgccatgaaaggtagctgttct

SEQ ID NO: 102949 - DNA, 80 bp, synthetic construct; identical to SEQ ID NO: 19745
  source 1..80: mol_type = other DNA

SEQ ID NO: 102950 - DNA, 80 bp, synthetic construct
  source 1..80: mol_type = other DNA
gacttctagtttagtaatttcacttaatcttcattagttccacttttcaactctctttgctgttctatttttaggacatg

SEQ ID NO: 102951 - DNA, 80 bp, synthetic construct
  source 1..80: mol_type = other DNA
gtttcctctttacattgctttctagataatttatagttccagttcctagatttagttcagtacacctgggtaggtgtatt

SEQ ID NO: 102952 - DNA, 80 bp, synthetic construct
  source 1..80: mol_type = other DNA
gataccgtaatgttttctttcttgagctgggtgttggtcatgcaggaatgttcacttgtgaaaatcatggaactgttttc

SEQ ID NO: 102953 - DNA, 80 bp, synthetic construct; identical to SEQ ID NO: 19746
  source 1..80: mol_type = other DNA

SEQ ID NO: 102954 - DNA, 80 bp, synthetic construct
  source 1..80: mol_type = other DNA
gactcattgcattttttgagtagttctttaaaatgataactgagatgggcaaggtgatgggggcttgtaattctagctat

SEQ ID NO: 102955 - DNA, 80 bp, synthetic construct
  source 1..80: mol_type = other DNA
atttgtatagggagctgtgcatatgattttatctgaacgtaacagcttcacagtcccctgtacctgccttttgattctat

SEQ ID NO: 102956 - DNA, 80 bp, synthetic construct
  source 1..80: mol_type = other DNA
tttttgctttcttacaggctattatgcatcatgaaggccacatggatgatggcataagtttgtcgagatcccagcatgaa

SEQ ID NO: 102957 - DNA, 80 bp, synthetic construct; identical to SEQ ID NO: 19747
  source 1..80: mol_type = other DNA

SEQ ID NO: 102958 - DNA, 80 bp, synthetic construct
  source 1..80: mol_type = other DNA
tggagtgcagtggtgcagtctcggctcactgcatcctctgcctcctgggttcaagcgattctcctccctcagcctcccga

SEQ ID NO: 102959 - DNA, 80 bp, synthetic construct
  source 1..80: mol_type = other DNA
cgtgcccagcctagttcctttttcaatgagggcagtgaagcctatatagctgcggagttttgatatgtatttttttaaag

SEQ ID NO: 102960 - DNA, 80 bp, synthetic construct
  source 1..80: mol_type = other DNA
ggtaacattataccaacatatgctctgacttgcgagagattgcatttgtctctttaaactttgctaatttgatgggggaa

SEQ ID NO: 102961 - DNA, 80 bp, synthetic construct
  source 1..80: mol_type = other DNA
ggaaagaatttgaaaggatttttgtagtagttgaattggtaaattttttttttggctttacagcataaaacaaatctccc

SEQ ID NO: 102962 - DNA, 80 bp, synthetic construct; identical to SEQ ID NO: 19748
  source 1..80: mol_type = other DNA

SEQ ID NO: 102963 - DNA, 80 bp, synthetic construct
  source 1..80: mol_type = other DNA
tcttcccactagtttttctttactagagctgatcaatcctatgatagggattgagcaaattaatcataaatctttgaaat

SEQ ID NO: 102964 - DNA, 80 bp, synthetic construct
  source 1..80: mol_type = other DNA
tttgtgggaaagctactatctcagtgttatagacataatgtagtgctagtataccataagtgacatttttttatgctggc

SEQ ID NO: 102965 - DNA, 80 bp, synthetic construct
  source 1..80: mol_type = other DNA
gagtgaaattcatttgttatacctgtcatgataaaataggatggttacattaacccctattaactatgaaaagattttct

SEQ ID NO: 102966 - DNA, 80 bp, synthetic construct; identical to SEQ ID NO: 19749
  source 1..80: mol_type = other DNA

SEQ ID NO: 102967 - DNA, 80 bp, synthetic construct
  source 1..80: mol_type = other DNA
atggccctatctctgctcactgcaacctgcctcccaggtttaagcaatttctactgtgtcagcttcccaagtggctagga

SEQ ID NO: 102968 - DNA, 80 bp, synthetic construct
  source 1..80: mol_type = other DNA
gcattgatatgttttctttcagtttcccctttgatgacttctttgaccaatagattttttcagtttccaaatattcgggg

SEQ ID NO: 102969 - DNA, 80 bp, synthetic construct
  source 1..80: mol_type = other DNA
gtgcattctcctcttgttgggtcgtgttcaaaagtgtcaatttagtattatttagatctttaatttccttacgtttttca

SEQ ID NO: 102970 - DNA, 80 bp, synthetic construct; identical to SEQ ID NO: 19750
  source 1..80: mol_type = other DNA

SEQ ID NO: 102971 - DNA, 80 bp, synthetic construct
  source 1..80: mol_type = other DNA
atttaaagtgcatttcttttaagcaataagtagttgggtcttgcatttttgtcccatttgataatccctgttttaaattg

SEQ ID NO: 102972 - DNA, 80 bp, synthetic construct
  source 1..80: mol_type = other DNA
gcatatgggttacaaaaaataaaccacctaagaacactttgtcattgtcccatttcctcctttttcttccttcttttgga

SEQ ID NO: 102973 - DNA, 80 bp, synthetic construct
  source 1..80: mol_type = other DNA
gccacagtctacctttaattgatattttgtcactctatgaatagtataagaacattataatagtatacttccctcccagt

SEQ ID NO: 102974 - DNA, 80 bp, synthetic construct; identical to SEQ ID NO: 19751
  source 1..80: mol_type = other DNA

SEQ ID NO: 102975 - DNA, 80 bp, synthetic construct
  source 1..80: mol_type = other DNA
gatagactcttttggcttttgtacaactgaaaatgtgttttttgccttcattttaagtgatatttttgctgtgtacagca

SEQ ID NO: 102976 - DNA, 80 bp, synthetic construct
  source 1..80: mol_type = other DNA
ttgagctttttcctgggatgctgttaagttacctaggaagagtttgatttgtttggatcttgcctttagaattttctggg

SEQ ID NO: 102977 - DNA, 80 bp, synthetic construct
  source 1..80: mol_type = other DNA
ctctaatcctttcaggtgattctgttccctgccttgagtagttttctcatgacattctcatcagtgttctgctgaatatt

SEQ ID NO: 102978 - DNA, 80 bp, synthetic construct
  source 1..80: mol_type = other DNA
gcctggaaattctcctaggcagtaaactgaggcagctgtaggactcacctgatttgtttccattcctcaggaattcctgt

SEQ ID NO: 102979 - DNA, 80 bp, synthetic construct; identical to SEQ ID NO: 19752
  source 1..80: mol_type = other DNA

SEQ ID NO: 102980 - DNA, 80 bp, synthetic construct
  source 1..80: mol_type = other DNA
taacaatgtctctcccttgtgatcacctgagaagtgccatggataaacacaattaacctttctttctcttgtgcttaact

SEQ ID NO: 102981 - DNA, 80 bp, synthetic construct
  source 1..80: mol_type = other DNA
gtaatcatgtttctattgcatatatatataaacttgcaagtttcacttaaatgcacaggagtattacctattataagtcc

SEQ ID NO: 102982 - DNA, 80 bp, synthetic construct; identical to SEQ ID NO: 19753
  source 1..80: mol_type = other DNA

SEQ ID NO: 102983 - DNA, 80 bp, synthetic construct
  source 1..80: mol_type = other DNA
ttagctggatgtggtgggcatgagcctgtaatctcagctgttctggaggctaaggctcgagaatcacttaaaccctgaac

SEQ ID NO: 102984 - DNA, 80 bp, synthetic construct
  source 1..80: mol_type = other DNA
ctgagcattttaaagagcatatgcttttcagtaaaatattttattcattttatcacattcatgaaagcaccgtctttaaa

SEQ ID NO: 102985 - DNA, 80 bp, synthetic construct
  source 1..80: mol_type = other DNA
ttatgtggtttatgttctgtgatccttctgttctctctctcccaggtcacggtggttgtggtagtactgtgtgtgtatgt

SEQ ID NO: 102986 - DNA, 80 bp, synthetic construct; identical to SEQ ID NO: 19754
  source 1..80: mol_type = other DNA

SEQ ID NO: 102987 - DNA, 80 bp, synthetic construct
  source 1..80: mol_type = other DNA
aattaacaattgtatatattacattatatatgtaaagtatatattatacattatataatatagtataaactatatactat

SEQ ID NO: 102988 - DNA, 80 bp, synthetic construct
  source 1..80: mol_type = other DNA
atttttcttctggatatattaataaatatattcttgaagtagatgagagaggggaggaacctgtatttgttaggtaataa

SEQ ID NO: 102989 - DNA, 80 bp, synthetic construct
  source 1..80: mol_type = other DNA
catctttgtattagaggaaagccctgaaacataacataattaataattttagaagtttggacaacatttcttctgacaag

SEQ ID NO: 102990 - DNA, 80 bp, synthetic construct
  source 1..80: mol_type = other DNA
agtttgaatttgttatacatttatttatgtttaattggagttaatggggtaaaatgtttagaaaaatacttcactgcatg

SEQ ID NO: 102991 - DNA, 80 bp, synthetic construct; identical to SEQ ID NO: 19755
  source 1..80: mol_type = other DNA

SEQ ID NO: 102992 - DNA, 80 bp, synthetic construct
  source 1..80: mol_type = other DNA
ataaaatgttaccatacagttttgctaatacagagagcaggaatggaagtgtaatatttctatgcattaacaacttgtca

SEQ ID NO: 102993 - DNA, 80 bp, synthetic construct
  source 1..80: mol_type = other DNA
tgagaatctcagtaagctcaacaaatgaacacatttacatgccagtaatatatctttcttccaaggctagaaaatacttc

SEQ ID NO: 102994 - DNA, 80 bp, synthetic construct
  source 1..80: mol_type = other DNA
ttgaactcacaggaattaaacagaatggcaagctagggtccatgaaaacttaggaattcctttttgaagacaaaccacaa

SEQ ID NO: 102995 - DNA, 80 bp, synthetic construct; identical to SEQ ID NO: 19756
  source 1..80: mol_type = other DNA

SEQ ID NO: 102996 - DNA, 80 bp, synthetic construct
  source 1..80: mol_type = other DNA
aaattgtgaatcactgacaatagagaaatgtttatggtttattttaggggccttgatgctctcagcaagaaagcgaaggc

SEQ ID NO: 102997 - DNA, 80 bp, synthetic construct
  source 1..80: mol_type = other DNA
tatcaacactcatttctcttctgttattctcttgtaaaaacagcttcttggttgggaaaattttccatctattttgacca

SEQ ID NO: 102998 - DNA, 80 bp, synthetic construct; identical to SEQ ID NO: 19757
  source 1..80: mol_type = other DNA

SEQ ID NO: 102999 - DNA, 80 bp, synthetic construct
  source 1..80: mol_type = other DNA
gagcaaccctacccttctcctttgcatctattacatttccatgtatgattgtattgccccaaaagtttcactgctaaaaa

SEQ ID NO: 103000 - DNA, 80 bp, synthetic construct
  source 1..80: mol_type = other DNA
gaataatgatttttttctgaataaatacttagctttgtaaaagtaacaaaaaaggttattcattgagtacacatggacac

SEQ ID NO: 103001 - DNA, 80 bp, synthetic construct
  source 1..80: mol_type = other DNA
ctgcacatgtaacccccaaagcctaaaataaaagttgtgacacagagaaataaaactaaacaaacaaaaccagaaagggt

SEQ ID NO: 103002 - DNA, 80 bp, synthetic construct; identical to SEQ ID NO: 19758
  source 1..80: mol_type = other DNA

SEQ ID NO: 103003 - DNA, 80 bp, synthetic construct
  source 1..80: mol_type = other DNA
agttaattggtttagatagtggtttatatagctctttatgtggttagatagctctttatgtggtttgccacgctttttac

SEQ ID NO: 103004 - DNA, 80 bp, synthetic construct
  source 1..80: mol_type = other DNA
gtcacttaacaatagaaggccataagtatgaagtacatatttttaggttattcttccactgctatttgatgatggcatac

SEQ ID NO: 103005 - DNA, 80 bp, synthetic construct
  source 1..80: mol_type = other DNA
gcagaatgacagttttggatgtctgattgtgattttttttttttttaacgttccagggaatgatcaacctcgtgcttgag

SEQ ID NO: 103006 - DNA, 80 bp, synthetic construct; identical to SEQ ID NO: 19759
  source 1..80: mol_type = other DNA

SEQ ID NO: 103007 - DNA, 80 bp, synthetic construct
  source 1..80: mol_type = other DNA
atcaaatggtgcttagtattaaaatccatctctgagtgagaaaggtagctagagaagtagatttgcctttggttaaagga

SEQ ID NO: 103008 - DNA, 80 bp, synthetic construct
  source 1..80: mol_type = other DNA
ctttatatgatctctgtttggcaacttctaagtacacctgacattgattaagcgacagttgctgtggtttaccctgcatt

SEQ ID NO: 103009 - DNA, 80 bp, synthetic construct
  source 1..80: mol_type = other DNA
gcctgcagttagggtaaagagggacagtttagtagtcaaagaaatagctgtagagattggctgtagtgccaattctctga

SEQ ID NO: 103010 - DNA, 80 bp, synthetic construct
  source 1..80: mol_type = other DNA
gcatggcctcttgctgcaaacatcttggaaaagatttcctgaaacaaagccttccaatgacaaatttgcaagatgtgcaa

SEQ ID NO: 103011 - DNA, 80 bp, synthetic construct; identical to SEQ ID NO: 19760
  source 1..80: mol_type = other DNA

SEQ ID NO: 103012 - DNA, 80 bp, synthetic construct
  source 1..80: mol_type = other DNA
cgttgtctcaccttttccagaattgttgtatatccttcaagacccagttcacatgtcactgtcttttaaagttactcttg

SEQ ID NO: 103013 - DNA, 80 bp, synthetic construct
  source 1..80: mol_type = other DNA
ctaaaaatacaaaaaattagccgagcgtggtggcgggagcctgtaaccccagctactcaggaggctgaggcaggagaacc

SEQ ID NO: 103014 - DNA, 80 bp, synthetic construct
  source 1..80: mol_type = other DNA
tctcccaactcttaagtataattgaaccttccttctctggtttcttgccactaagtttcacctgtattttatagcacttg

SEQ ID NO: 103015 - DNA, 80 bp, synthetic construct
  source 1..80: mol_type = other DNA
tattcattacgtgactaagttctgataaaataggaaagcatacctaagtatagaaaggagataatgcaaaaaaagttaaa

SEQ ID NO: 103016 - DNA, 80 bp, synthetic construct; identical to SEQ ID NO: 19761
  source 1..80: mol_type = other DNA

SEQ ID NO: 103017 - DNA, 80 bp, synthetic construct
  source 1..80: mol_type = other DNA
gcagagactaaagtgtggtgatgtttttaacactacatcctaccttcttcacttggtataagatgaatttcttggataaa

SEQ ID NO: 103018 - DNA, 80 bp, synthetic construct
  source 1..80: mol_type = other DNA
aggccagcctgggcaaccacctctaaattttaaaaaagaagaatttcatgtatgaatgtttgagggtagaaagtgttacg

SEQ ID NO: 103019 - DNA, 80 bp, synthetic construct; identical to SEQ ID NO: 19762
  source 1..80: mol_type = other DNA

SEQ ID NO: 103020 - DNA, 80 bp, synthetic construct
  source 1..80: mol_type = other DNA
tagaacctacaaaagtaacattaatagactttacaaaatgttggggacttggtgggtatgaacacggttcctgctcctaa

SEQ ID NO: 103021 - DNA, 80 bp, synthetic construct
  source 1..80: mol_type = other DNA
tgttcagttggaaataacagaatacccaaacccaaactggcttcaaaaacagaggggattttggggcttgcacagctcgc

SEQ ID NO: 103022 - DNA, 80 bp, synthetic construct
  source 1..80: mol_type = other DNA
ctgacatgggaaaagtgaaagagggcttgttccagaagttatcccttgtgaaagagtgtgctatttcctaaaatccccaa

SEQ ID NO: 103023 - DNA, 80 bp, synthetic construct; identical to SEQ ID NO: 19763
  source 1..80: mol_type = other DNA

SEQ ID NO: 103024 - DNA, 80 bp, synthetic construct
  source 1..80: mol_type = other DNA
tccattgacttttctgtagcagggtgcatttggctatcaaattagtgtattaaaaaccagtggaactcttactcctcttt

SEQ ID NO: 103025 - DNA, 80 bp, synthetic construct
  source 1..80: mol_type = other DNA
cagcatcgcatattgttgttcttcttatcattattcccatttcttttggatgtttgttatcatcctttcccttgttaaca

SEQ ID NO: 103026 - DNA, 80 bp, synthetic construct
  source 1..80: mol_type = other DNA
gtatactggttcttgttttcctcatcggaaaatggcaggaacaaagtttgctttatcactatccccagactgcaaatttt

SEQ ID NO: 103027 - DNA, 80 bp, synthetic construct; identical to SEQ ID NO: 19764
  source 1..80: mol_type = other DNA

SEQ ID NO: 103028 - DNA, 80 bp, synthetic construct
  source 1..80: mol_type = other DNA
gtcgctgattctgtctagttagcgggctacaacttgggagagagatcttgatattatatttttcattattctgaatctat

SEQ ID NO: 103029 - DNA, 80 bp, synthetic construct
  source 1..80: mol_type = other DNA
atctacaaggtaattttagtgggagatggggtgtttccactggatagaattatgagagtttttttaatgtttttgagttc

SEQ ID NO: 103030 - DNA, 80 bp, synthetic construct
  source 1..80: mol_type = other DNA
acctaaatatatacttcagtttgtctggaaaagtctcagatctgcagcaataattggagtcctgtaagacatgtgtatct

SEQ ID NO: 103031 - DNA, 80 bp, synthetic construct
  source 1..80: mol_type = other DNA
ctattttgcacagagagaaaaccaagaaggtgggaataagaatctataacaattttgcattcgacatggatatatttcat

SEQ ID NO: 103032 - DNA, 80 bp, synthetic construct; identical to SEQ ID NO: 19765
  source 1..80: mol_type = other DNA

SEQ ID NO: 103033 - DNA, 80 bp, synthetic construct
  source 1..80: mol_type = other DNA
acattgagaaaaggcagtcaagaggtgaagaagaaggaaatgggctttagacatgcacagatcggtgttattctagtgtt

SEQ ID NO: 103034 - DNA, 80 bp, synthetic construct
  source 1..80: mol_type = other DNA
ccaaacacagggacagctctccaagctctccaagaagtttcaatgcattatcttcttagattcttcagtacattctgaag

SEQ ID NO: 103035 - DNA, 80 bp, synthetic construct; identical to SEQ ID NO: 19766
  source 1..80: mol_type = other DNA

SEQ ID NO: 103036 - DNA, 80 bp, synthetic construct
  source 1..80: mol_type = other DNA
tgagtccaagaattcaaagacattgaagcatgaagcctccggggataggatgatactaataaaacagatgaatattgcat

SEQ ID NO: 103037 - DNA, 80 bp, synthetic construct
  source 1..80: mol_type = other DNA
tgaggaagggagttggagaccatcctaggcaacataaagagaccctgtctctacaaaaagataaaagatcttaacttagt

SEQ ID NO: 103038 - DNA, 80 bp, synthetic construct
  source 1..80: mol_type = other DNA
ctctgagacatctcataatgaaagccactacagatactgatggcatggttttccgttttatttttggaaaggcattaact

SEQ ID NO: 103039 - DNA, 80 bp, synthetic construct
  source 1..80: mol_type = other DNA
cattttgcacacctgcatgcgtgcttgcagaataacacgtgtgtacatatctgcacatctttgcagcaagacatcaccta

SEQ ID NO: 103040 - DNA, 80 bp, synthetic construct; identical to SEQ ID NO: 19767
  source 1..80: mol_type = other DNA

SEQ ID NO: 103041 - DNA, 80 bp, synthetic construct
  source 1..80: mol_type = other DNA
ttttgacctggggaagcagtcccactaatatcaatcttcctcaagctctctgtttctatctcagtcccttatcaagatat

SEQ ID NO: 103042 - DNA, 80 bp, synthetic construct
  source 1..80: mol_type = other DNA
cattgtgggcctctatccttggtagtaactataaaccttcatcagactttagcagatgtacacttctgtgctgaggtaat

SEQ ID NO: 103043 - DNA, 80 bp, synthetic construct
  source 1..80: mol_type = other DNA
taactgatatcttcttaactgactggatgaattataataattcacagactccatttatctgtaaaatgtattggtaccca

SEQ ID NO: 103044 - DNA, 80 bp, synthetic construct; identical to SEQ ID NO: 19768
  source 1..80: mol_type = other DNA

SEQ ID NO: 103045 - DNA, 80 bp, synthetic construct
  source 1..80: mol_type = other DNA
agtttccttagttttttggctttggaatacggtcatgtgtcacttactcatgggaacagttctaaggaatacatcttgca

SEQ ID NO: 103046 - DNA, 80 bp, synthetic construct
  source 1..80: mol_type = other DNA
ctgcgcgtctacgctatacgggatggcctactgctcctgggctacataacctatggctgtacatttgtacagcaatatgt

SEQ ID NO: 103047 - DNA, 80 bp, synthetic construct
  source 1..80: mol_type = other DNA
aagtagtgtagaaattacttatttattgaatatgtgcgaaaaagcttttggtctttgacatttcaatattactcatgatt

SEQ ID NO: 103048 - DNA, 80 bp, synthetic construct; identical to SEQ ID NO: 19769
  source 1..80: mol_type = other DNA

SEQ ID NO: 103049 - DNA, 80 bp, synthetic construct
  source 1..80: mol_type = other DNA
cccaaagtactgggattataggtatgagccactacgcctggtgtaatgcccttttcttaattttgtccttttttcctttt

SEQ ID NO: 103050 - DNA, 80 bp, synthetic construct
  source 1..80: mol_type = other DNA
tttgatgttcttttcctctatttcaaaagacgtatttaccatttttcacccaattgcttagcaattaaagtgtttattta

SEQ ID NO: 103051 - DNA, 80 bp, synthetic construct; identical to SEQ ID NO: 19770
  source 1..80: mol_type = other DNA

SEQ ID NO: 103052 - DNA, 80 bp, synthetic construct
  source 1..80: mol_type = other DNA
gttttcattttagatggataatatgataatgatatatattatatatatacctatataattttagataatacaatagttta

SEQ ID NO: 103053 - DNA, 80 bp, synthetic construct
  source 1..80: mol_type = other DNA
aattgggaacagatattcttacagaataaaattagttctgcttagaacttagtacttctcattcctctgctatattccac

SEQ ID NO: 103054 - DNA, 80 bp, synthetic construct
  source 1..80: mol_type = other DNA
atctctgtacaaatgtcacagaggcgctatacacaaaaaagctcttctcatgaagttggcgtcttttctgtgtgtttctt

SEQ ID NO: 103055 - DNA, 80 bp, synthetic construct; identical to SEQ ID NO: 19771
  source 1..80: mol_type = other DNA

SEQ ID NO: 103056 - DNA, 80 bp, synthetic construct
  source 1..80: mol_type = other DNA
actggagtgcggtggcacgatcttggctcactgcaacatctgcctcccgggttcaagcgattctcttaactcagcctcct

SEQ ID NO: 103057 - DNA, 80 bp, synthetic construct
  source 1..80: mol_type = other DNA
caccacccctggcctaccagattttcaatagtgattattcttatagagacatctttctctctttaaatatcatattgtct

SEQ ID NO: 103058 - DNA, 80 bp, synthetic construct
  source 1..80: mol_type = other DNA
gaaaagtcacataggagttttatttaaaatgggttgttcaatcaaagaagtgtagaaaacagtagtctaagccaagctag

SEQ ID NO: 103059 - DNA, 80 bp, synthetic construct
  source 1..80: mol_type = other DNA
ctgttagagttataattactagttatatctcctagtattttgtggttcattttcagaaaaactgatttgctctttttatt

SEQ ID NO: 103060 - DNA, 80 bp, synthetic construct; identical to SEQ ID NO: 19772
  source 1..80: mol_type = other DNA

SEQ ID NO: 103061 - DNA, 80 bp, synthetic construct
  source 1..80: mol_type = other DNA
aaggtgaaatctatttcttcttttgcagcggctctaattagaggaaatcgtaaaaactgtgctcaattttctggctccct

SEQ ID NO: 103062 - DNA, 80 bp, synthetic construct
  source 1..80: mol_type = other DNA
gtgtactgagtcccagatactcaggaggctgaggtaggaggatcacttgaggctaggagtttgaggctgtagtgcactat

SEQ ID NO: 103063 - DNA, 80 bp, synthetic construct
  source 1..80: mol_type = other DNA
gaatagtcatctaacaatatcatgtccatttatatcttaaaaaacctatttataaagccctgaaaaccactaaagagcca

SEQ ID NO: 103064 - DNA, 80 bp, synthetic construct; identical to SEQ ID NO: 19773
  source 1..80: mol_type = other DNA

SEQ ID NO: 103065 - DNA, 80 bp, synthetic construct
  source 1..80: mol_type = other DNA
tgacacccaaatgaatctactgctcttccatctgtttgcacagtatttcattatttgcctttctttatcactaatgccct

SEQ ID NO: 103066 - DNA, 80 bp, synthetic construct
  source 1..80: mol_type = other DNA
ttaaaattcactcaaaaaataccactgtccatacaaaatagttctgagacttttgcatgataaagacccactcagggaca

SEQ ID NO: 103067 - DNA, 80 bp, synthetic construct
  source 1..80: mol_type = other DNA
agtggaggacaaaaatttgagtcatagtgagttcttgggcactgctagatcgttgggcagcagaagtaagatagaaatgg

SEQ ID NO: 103068 - DNA, 80 bp, synthetic construct; identical to SEQ ID NO: 19774
  source 1..80: mol_type = other DNA

SEQ ID NO: 103069 - DNA, 80 bp, synthetic construct
  source 1..80: mol_type = other DNA
ttgagaaatctggcctgcaccagagtgcaccagattttataggcaggcttgaggaagcagtgtctgatttgcatagggcc

SEQ ID NO: 103070 - DNA, 80 bp, synthetic construct
  source 1..80: mol_type = other DNA
gccgccattttgaacatgcctagtcccaggtggtcttttcctattggcacaactgctggcattcacccgtggaagcttcc

SEQ ID NO: 103071 - DNA, 80 bp, synthetic construct; identical to SEQ ID NO: 19775
  source 1..80: mol_type = other DNA

SEQ ID NO: 103072 - DNA, 80 bp, synthetic construct
  source 1..80: mol_type = other DNA
atcctttaaggtcaaccaagtacagtccagtgttttcagagtcttcagttttgtcagttacaggcacagtttcatcagat

SEQ ID NO: 103073 - DNA, 80 bp, synthetic construct
  source 1..80: mol_type = other DNA
acaaattattatttgctgttgtctttttccagtcaatctgttgattgcaggcattcctaatgaaaagggaagccctgtgc

SEQ ID NO: 103074 - DNA, 80 bp, synthetic construct
  source 1..80: mol_type = other DNA
ctccctagcatcagacttgcaatatgaccatgatactttgtagctcttgttttttaagtatctaaaatatattttgctga

SEQ ID NO: 103075 - DNA, 80 bp, synthetic construct; identical to SEQ ID NO: 19776
  source 1..80: mol_type = other DNA

SEQ ID NO: 103076 - DNA, 80 bp, synthetic construct
  source 1..80: mol_type = other DNA
cattgccagatgcagaacaatgcctaggattgccttaaaaaacaacattggaaatgaagtgatgaatcataggtgaatag

SEQ ID NO: 103077 - DNA, 80 bp, synthetic construct
  source 1..80: mol_type = other DNA
gaaagtagaaagaaataaatgaaaagaggaaagaaggggcaaaaaccctgtgtaatatgtatatatgtctttgcacgcat

SEQ ID NO: 103078 - DNA, 80 bp, synthetic construct
  source 1..80: mol_type = other DNA
tgggttctctaggacagggaattgcttgtcaaaacttgtgataaatagcaaatgggaagtcattagacccaaaggataga

SEQ ID NO: 103079 - DNA, 80 bp, synthetic construct; identical to SEQ ID NO: 19777
  source 1..80: mol_type = other DNA

SEQ ID NO: 103080 - DNA, 80 bp, synthetic construct
  source 1..80: mol_type = other DNA
atcccagctactggggaggccgaggcatgagaatcgcttgaacttgggaggcggaggttgcggtgagccgagattgcacg

SEQ ID NO: 103081 - DNA, 80 bp, synthetic construct
  source 1..80: mol_type = other DNA
tgcctggctgtagatattacatattgtaagaggccttttatcaacatggtgttcagctgcaaataagggaaagttctact

SEQ ID NO: 103082 - DNA, 80 bp, synthetic construct
  source 1..80: mol_type = other DNA
tctttactccaggcaagaggattgaggtaggactcaaccgacggagatactgataatgacaagcattacctctacattta

SEQ ID NO: 103083 - DNA, 80 bp, synthetic construct; identical to SEQ ID NO: 19778
  source 1..80: mol_type = other DNA

SEQ ID NO: 103084 - DNA, 80 bp, synthetic construct
  source 1..80: mol_type = other DNA
tatgtacgtgtgtatatatgtgtgtgtgtgtgtgtgtagatctatacatatatatgtatagatatatacatatgtataga

SEQ ID NO: 103085 - DNA, 80 bp, synthetic construct
  source 1..80: mol_type = other DNA
tatatgcctgggaccacagtgattaagaagtcagagtgaatacctttacagacaaccagaaacatatttaaggcttgtga

SEQ ID NO: 103086 - DNA, 80 bp, synthetic construct
  source 1..80: mol_type = other DNA
tccctgggagagctttgcttcccaaagaaagcctttctaggagaaagactcaggccctacctcaatctcttgcctggaac

SEQ ID NO: 103087 - DNA, 80 bp, synthetic construct
  source 1..80: mol_type = other DNA
agagtagtaggactttcccttacttgcagctgaacaccatgttgataaaaggcctcttacaatgtgtaatatttacagcc

SEQ ID NO: 103088 - DNA, 80 bp, synthetic construct; identical to SEQ ID NO: 19779
  source 1..80: mol_type = other DNA

SEQ ID NO: 103089 - DNA, 80 bp, synthetic construct
  source 1..80: mol_type = other DNA
ctaagcaggctttcataggctttctcttgatcttaatttctttgagcctcctggtgtaatcttaaattccccaattatat

SEQ ID NO: 103090 - DNA, 80 bp, synthetic construct
  source 1..80: mol_type = other DNA
agagacacattagcaacaccaagggagttttttaaaatttattttaaattgacaaactgtaactgtatagatttgtggga

SEQ ID NO: 103091 - DNA, 80 bp, synthetic construct
  source 1..80: mol_type = other DNA
cactctgaattcatttggggaatgaaagataaatcacatattttccctgacttcaagtgtgtctagtgattatgtcgctg

SEQ ID NO: 103092 - DNA, 80 bp, synthetic construct; identical to SEQ ID NO: 19780
  source 1..80: mol_type = other DNA

SEQ ID NO: 103093 - DNA, 80 bp, synthetic construct
  source 1..80: mol_type = other DNA
gtttgaaaccagcctggccaacatagtgaaaccccgactctactaaaatacaaaaaattagccaggcatggtggcaggtg

SEQ ID NO: 103094 - DNA, 80 bp, synthetic construct
  source 1..80: mol_type = other DNA
acgagtctttgagtggtctccagatatcaaagcttcatgctcatgtacagaacaacttgtggtacctgtaaataggatgg

SEQ ID NO: 103095 - DNA, 80 bp, synthetic construct
  source 1..80: mol_type = other DNA
tttcctccttgatatttacttaagtgtgggcaattgaattagaaagaacaagagctcacatgatatttattgtctgagat

SEQ ID NO: 103096 - DNA, 80 bp, synthetic construct; identical to SEQ ID NO: 19781
  source 1..80: mol_type = other DNA

SEQ ID NO: 103097 - DNA, 80 bp, synthetic construct
  source 1..80: mol_type = other DNA
ttactacaaatataaaaataagctgggcgtagtggtgcgcacctgtagtccctgctactcaggaggctgaggcaggagaa

SEQ ID NO: 103098 - DNA, 80 bp, synthetic construct
  source 1..80: mol_type = other DNA
tctcctttgggaactgagcttaagtttcattgtcagggacagaactgaagttttggcttttaggcactgttactgacaga

SEQ ID NO: 103099 - DNA, 80 bp, synthetic construct; identical to SEQ ID NO: 19782
  source 1..80: mol_type = other DNA

SEQ ID NO: 103100 - DNA, 80 bp, synthetic construct
  source 1..80: mol_type = other DNA
tatagtgaaagtagtcttgatggatattagccgaggtgctttggcacccatgaaaggtacctgctctggagagaggtgac

SEQ ID NO: 103101 - DNA, 80 bp, synthetic construct
  source 1..80: mol_type = other DNA
tctatttctatcttctttgctgctatgtttaggagaagcagagctcataggttacaggtatggattttagagttggactg

SEQ ID NO: 103102 - DNA, 80 bp, synthetic construct
  source 1..80: mol_type = other DNA
attaaatgtataaaaataccacagtacgcacctagcaccttttatttttggatttagcagttgttggtagctacaagatt

SEQ ID NO: 103103 - DNA, 80 bp, synthetic construct
  source 1..80: mol_type = other DNA
ctacacaataactttataaagtgaataatattagtattcccatttcacagctgggaaactgagacatggtgaaattgtct

SEQ ID NO: 103104 - DNA, 80 bp, synthetic construct; identical to SEQ ID NO: 19783
  source 1..80: mol_type = other DNA

SEQ ID NO: 103105 - DNA, 80 bp, synthetic construct
  source 1..80: mol_type = other DNA
gagttacattgggtgatgcaggcttagtggcgaatgattcaaaatactactcttcattaaatcacaaagtgttttggtct

SEQ ID NO: 103106 - DNA, 80 bp, synthetic construct
  source 1..80: mol_type = other DNA
tgtgctttttgtcaatgtattgcacaacctttctccttccttccccttactttacacttgctaactacaacaactagact

SEQ ID NO: 103107 - DNA, 80 bp, synthetic construct; identical to SEQ ID NO: 19784
  source 1..80: mol_type = other DNA

SEQ ID NO: 103108 - DNA, 80 bp, synthetic construct
  source 1..80: mol_type = other DNA
gcactgtgctgacagtgtcatatgcattactccactggatttccacagttactctataaggtaggttttattacaatttc

SEQ ID NO: 103109 - DNA, 80 bp, synthetic construct
  source 1..80: mol_type = other DNA
acctaacacagtgaatggtccatttgatgtactcagcgatgcatgaatgaataaatgaaagagacccccagaaaaccaga

SEQ ID NO: 103110 - DNA, 80 bp, synthetic construct
  source 1..80: mol_type = other DNA
caaaaatcagctgggtgtggtggcatgcgcctgttgtcccagttacttgggaggctgaggcaggaggatcgcttaagcct

SEQ ID NO: 103111 - DNA, 80 bp, synthetic construct
  source 1..80: mol_type = other DNA
tctaataccgttacttgttgtataatgaactgcttttagttgacattctcttttcttttaactggactttaacttctata

SEQ ID NO: 103112 - DNA, 80 bp, synthetic construct; identical to SEQ ID NO: 19785
  source 1..80: mol_type = other DNA

SEQ ID NO: 103113 - DNA, 80 bp, synthetic construct
  source 1..80: mol_type = other DNA
gggcttattttcttctttagccacaaaaccagcataaaaatatgaagcatatgtaattatgtattttggtaatttggctt

SEQ ID NO: 103114 - DNA, 80 bp, synthetic construct
  source 1..80: mol_type = other DNA
ccctgttaacaggaagcaaaatgtgcactgcttcttttttcttttctttctgattatatgtaaagaataaaaagttaaaa

SEQ ID NO: 103115 - DNA, 80 bp, synthetic construct
  source 1..80: mol_type = other DNA
tatgctatatattgactcatcattcaactcttgctatttgttttgggtagacccaattctccttggtaggaagagcaaac

SEQ ID NO: 103116 - DNA, 80 bp, synthetic construct; identical to SEQ ID NO: 19786
  source 1..80: mol_type = other DNA

SEQ ID NO: 103117 - DNA, 80 bp, synthetic construct
  source 1..80: mol_type = other DNA
atgttggtttcgtaagaagacactcctgttaaccaggggtgctttatgctttgttttagcatttattaaaccctaagtct

SEQ ID NO: 103118 - DNA, 80 bp, synthetic construct; identical to SEQ ID NO: 19787
  source 1..80: mol_type = other DNA

SEQ ID NO: 103119 - DNA, 80 bp, synthetic construct
  source 1..80: mol_type = other DNA
ttctgtacctggcttatttcacttacatactcatctccagttcatccatgttgttgcaaatgactggatcacattctttt

SEQ ID NO: 103120 - DNA, 80 bp, synthetic construct
  source 1..80: mol_type = other DNA
tgggtatatactcagcagtgggattgctggatcacatagtagctcaatttttagttttttgaggaacctccaaaatgttc

SEQ ID NO: 103121 - DNA, 80 bp, synthetic construct
  source 1..80: mol_type = other DNA
gatgatccttcactgcatttttgactcagctctcctgtaatctcaagaatgcaaaactttctgtggttctgcccacttgc

SEQ ID NO: 103122 - DNA, 80 bp, synthetic construct
  source 1..80: mol_type = other DNA
tgatcagtgttgtccattcagcatttctctacctcttacgactatcatcactgctccacaaaggagcatattggtaattc

SEQ ID NO: 103123 - DNA, 80 bp, synthetic construct; identical to SEQ ID NO: 19788
  source 1..80: mol_type = other DNA

SEQ ID NO: 103124 - DNA, 80 bp, synthetic construct
  source 1..80: mol_type = other DNA
ttaggaatgcaaatgtcgttcatgttctgtgtgtttccctgttctttctagtcatttcccagtttacttccccatctttt

SEQ ID NO: 103125 - DNA, 80 bp, synthetic construct
  source 1..80: mol_type = other DNA
acaaatacctgtggtttgaataatttgtaattaattcactgggtctctgattgtgacttctttcgctgatctgctgtgga

SEQ ID NO: 103126 - DNA, 80 bp, synthetic construct
  source 1..80: mol_type = other DNA
ctccttctggagtaatcttttgtccagtattattactcctacttgaaatagaggtggaagagagactttccttctcccag

SEQ ID NO: 103127 - DNA, 80 bp, synthetic construct
  source 1..80: mol_type = other DNA
catagatgagaaacagtaccatggggggtggggcatggtggtttctaagtctgtggttttcctgggctttctgcagtgat

SEQ ID NO: 103128 - DNA, 80 bp, synthetic construct; identical to SEQ ID NO: 19789
  source 1..80: mol_type = other DNA

SEQ ID NO: 103129 - DNA, 80 bp, synthetic construct
  source 1..80: mol_type = other DNA
gaatattctctacccatcacagcacttggccacagctcccaataccattaagttatttctagacatttagttacatcctt

SEQ ID NO: 103130 - DNA, 80 bp, synthetic construct
  source 1..80: mol_type = other DNA
gttctacaaacaaacagcacagaaatttgccgaattcaccaagtaaaatttttcctcaaattgaaacacagataaggaaa

SEQ ID NO: 103131 - DNA, 80 bp, synthetic construct
  source 1..80: mol_type = other DNA
ggcagatttattttgtttaaacagaatgtgagaaccaacagtccatttatattcattcacttattcatttggcaaacacg

SEQ ID NO: 103132 - DNA, 80 bp, synthetic construct; identical to SEQ ID NO: 19790
  source 1..80: mol_type = other DNA

SEQ ID NO: 103133 - DNA, 80 bp, synthetic construct
  source 1..80: mol_type = other DNA
ctgtctggttcactgctgatcccattccttggaacagtgcctggtaggtgcttaataaatatatatgattcatatgtagg

SEQ ID NO: 103134 - DNA, 80 bp, synthetic construct
  source 1..80: mol_type = other DNA
aaggtctgggaagccattaaagattttaagcaagggagtgacattgattaaatgtgtgtttcagcataaccacctacagt

SEQ ID NO: 103135 - DNA, 80 bp, synthetic construct
  source 1..80: mol_type = other DNA
aaaatgacttcaggtttttagcttgaatatatggatgcacgatggatgagagaagcaattttacatatatacgtacaaag

SEQ ID NO: 103136 - DNA, 80 bp, synthetic construct; identical to SEQ ID NO: 19791
  source 1..80: mol_type = other DNA

SEQ ID NO: 103137 - DNA, 80 bp, synthetic construct
  source 1..80: mol_type = other DNA
gctaatgttactggccttttgttgtcaggcctcattaagttgcatgaattgactaagtattgagatttagtggcagaaat

SEQ ID NO: 103138 - DNA, 80 bp, synthetic construct
  source 1..80: mol_type = other DNA
ttctggtcttttttaaaatatgtattttatacaaatgaatatattttacatagttgcaattataatctatatgttatttt

SEQ ID NO: 103139 - DNA, 80 bp, synthetic construct; identical to SEQ ID NO: 19792
  source 1..80: mol_type = other DNA

SEQ ID NO: 103140 - DNA, 80 bp, synthetic construct
  source 1..80: mol_type = other DNA
aagcatatatcagcataatttaaatatacgcataatattgtatacctattcctttttttatttaaaaatggactctttgg

SEQ ID NO: 103141 - DNA, 80 bp, synthetic construct
  source 1..80: mol_type = other DNA
ccaggagttcaagaccagtctgggcaacataatgagaccacccccgtctctacaaaaaaaaaaaaaaaaaaaagctcagc

SEQ ID NO: 103142 - DNA, 80 bp, synthetic construct
  source 1..80: mol_type = other DNA
attccaataaaccagggttattcttgaggtattggccatctaatatgcctgcatatttcagtttattccaataaaattga

SEQ ID NO: 103143 - DNA, 80 bp, synthetic construct
  source 1..80: mol_type = other DNA
ctaggctaaataggagaaaaatcggggatttgttttcatatagccatttttgcactttgtgacatacgctatttacttcc

SEQ ID NO: 103144 - DNA, 80 bp, synthetic construct; identical to SEQ ID NO: 19793
  source 1..80: mol_type = other DNA

SEQ ID NO: 103145 - DNA, 80 bp, synthetic construct
  source 1..80: mol_type = other DNA
cttggggcctcctttataaaggcactaatcccattcttaagggctctaccttcatgacctaatcacctccccaaggggaa

SEQ ID NO: 103146 - DNA, 80 bp, synthetic construct
  source 1..80: mol_type = other DNA
ggtactttgtaatattctcccccgcccttaagaatgtactttgtacacctaccccaaacctataagaactaatgataatc

SEQ ID NO: 103147 - DNA, 80 bp, synthetic construct; identical to SEQ ID NO: 19794
  source 1..80: mol_type = other DNA

SEQ ID NO: 103148 - DNA, 80 bp, synthetic construct
  source 1..80: mol_type = other DNA
agccaaataaccccattaaaaaattgtcaaaagacttgaacagacacttctcaaaagaagacagacaagcagccaacaaa

SEQ ID NO: 103149 - DNA, 80 bp, synthetic construct
  source 1..80: mol_type = other DNA
aggtgggcggatcgcctgagatcaggagttcgagaccagcctggccaacatggtgaaaccccatctctactaaaaataca

SEQ ID NO: 103150 - DNA, 80 bp, synthetic construct
  source 1..80: mol_type = other DNA
tccagcctgggtaacaaaagcgaaactccatctcaaaaagaaaaaaggcttatattgttggtgggaatgtaaattagttc

SEQ ID NO: 103151 - DNA, 80 bp, synthetic construct; identical to SEQ ID NO: 19795
  source 1..80: mol_type = other DNA

SEQ ID NO: 103152 - DNA, 80 bp, synthetic construct
  source 1..80: mol_type = other DNA
atcacttatagtgggagctaaacaaggggtactcatggacataaagatagcaacaatagactagccactactaagtggga

SEQ ID NO: 103153 - DNA, 80 bp, synthetic construct
  source 1..80: mol_type = other DNA
ttattttttataaaaaggcagccgtgtgctctatagcaatcaataatggggagaaaacaaacaaaaacatcgggatagca

SEQ ID NO: 103154 - DNA, 80 bp, synthetic construct
  source 1..80: mol_type = other DNA
tagcattagtttctgttgtctttgatttttaactgttatgcattgttggaacacagcagctgattttgaacagctccaaa

SEQ ID NO: 103155 - DNA, 80 bp, synthetic construct; identical to SEQ ID NO: 19796
  source 1..80: mol_type = other DNA

SEQ ID NO: 103156 - DNA, 80 bp, synthetic construct
  source 1..80: mol_type = other DNA
ggacccattctcattgttgacaaggcaagcttgttcagaaaacatgaacacagaggtacacatttagctttacaagttca

SEQ ID NO: 103157 - DNA, 80 bp, synthetic construct
  source 1..80: mol_type = other DNA
tattttacatatttctcttatttaacaaactaagaaatcttgtgtactataaacctcaaggagaatgtcatgatctccat

SEQ ID NO: 103158 - DNA, 80 bp, synthetic construct
  source 1..80: mol_type = other DNA
acgttcaagactttactcatgcacatactgcccttcctttcctggaaagcctgaaaatggtcatgaacgtattctttaag

SEQ ID NO: 103159 - DNA, 80 bp, synthetic construct; identical to SEQ ID NO: 19797
  source 1..80: mol_type = other DNA

SEQ ID NO: 103160 - DNA, 80 bp, synthetic construct
  source 1..80: mol_type = other DNA
aaacatggaagaaatcacaaggtaaatgaactattttatttccctgaatgaattctcaaatccttttagatatattttta

SEQ ID NO: 103161 - DNA, 80 bp, synthetic construct
  source 1..80: mol_type = other DNA
accatgcccggctaatttttgtatttttagtagagacagggttttaccatattggtcaggctggtcttgagctcctgacc

SEQ ID NO: 103162 - DNA, 80 bp, synthetic construct
  source 1..80: mol_type = other DNA
aagttggaaaattagtgggaaactactgtaatgtttaaataactgagtcaaatgtaactggaggaatgcatttgctttgt

SEQ ID NO: 103163 - DNA, 80 bp, synthetic construct; identical to SEQ ID NO: 19798
  source 1..80: mol_type = other DNA

SEQ ID NO: 103164 - DNA, 80 bp, synthetic construct
  source 1..80: mol_type = other DNA
ggaaagcagggagggagggaggatcagctgaaagtaatttctcttttcaggttctggatgtcttgtgctcactctgtgtt

SEQ ID NO: 103165 - DNA, 80 bp, synthetic construct
  source 1..80: mol_type = other DNA
acgtcttgtgaaccatgtcagcaggtaaattcagacagacaatgtcacctgacaggtaccataataaaagaattaatgtt

SEQ ID NO: 103166 - DNA, 80 bp, synthetic construct
  source 1..80: mol_type = other DNA
ataagagcttttattcacattcctatgtagatacataaccattggcatcttcaggaccaccctgacaactgtataggtat

SEQ ID NO: 103167 - DNA, 80 bp, synthetic construct
  source 1..80: mol_type = other DNA
ccgggttcaggccattgtcctgcctcagcctcccgagtagctgggactacaggtgcccgccaccacgcctggctaatttt

SEQ ID NO: 103168 - DNA, 80 bp, synthetic construct; identical to SEQ ID NO: 19799
  source 1..80: mol_type = other DNA

SEQ ID NO: 103169 - DNA, 80 bp, synthetic construct
  source 1..80: mol_type = other DNA
acgaaaaaactggaactggaagtggaacttagatctaaatccagagactgagcttataaccaccgcgccacactgccttt

SEQ ID NO: 103170 - DNA, 80 bp, synthetic construct
  source 1..80: mol_type = other DNA
gtcccaaaacctcaaaagtagggaggccagaagtgcagccttcagcctgtggctgaaggcccgagagcccctggcaaacc

SEQ ID NO: 103171 - DNA, 80 bp, synthetic construct
  source 1..80: mol_type = other DNA
attagatggtgcccacccagattgaggatgggtcggcctctcccagcccactgactcaaatgttaatctcgtttggcaac

SEQ ID NO: 103172 - DNA, 80 bp, synthetic construct; identical to SEQ ID NO: 19800
  source 1..80: mol_type = other DNA

SEQ ID NO: 103173 - DNA, 80 bp, synthetic construct
  source 1..80: mol_type = other DNA
ccacacccagctaatttttgtatttttagtagagacggggtttcaccatgttggccagcctggtctcgaactcctgacct

SEQ ID NO: 103174 - DNA, 80 bp, synthetic construct
  source 1..80: mol_type = other DNA
caagatgcttaaatttatagatgtttaccagtccattttccaggaggataaatggaggatgagcaaggtttcataactag

SEQ ID NO: 103175 - DNA, 80 bp, synthetic construct; identical to SEQ ID NO: 19801
  source 1..80: mol_type = other DNA

SEQ ID NO: 103176 - DNA, 80 bp, synthetic construct
  source 1..80: mol_type = other DNA
gagtgatatgttctgagaccttcattcatttctacctagtattaccatagggtatatgtccactcctaaaatggaattaa

SEQ ID NO: 103177 - DNA, 80 bp, synthetic construct
  source 1..80: mol_type = other DNA
cacaaagcttagcttaggaaaatttctccatgtccggaattcccaataactccattaattctaaaagtctgctctgagtg

SEQ ID NO: 103178 - DNA, 80 bp, synthetic construct
  source 1..80: mol_type = other DNA
ggaatgttcacagtgaagctggctttctctgtgtactacctcagtggtagttttaataattttttagtaattaaggaaat

SEQ ID NO: 103179 - DNA, 80 bp, synthetic construct; identical to SEQ ID NO: 19802
  source 1..80: mol_type = other DNA

SEQ ID NO: 103180 - DNA, 80 bp, synthetic construct
  source 1..80: mol_type = other DNA
aaggtttttttggactttccttacatgtgattcccgtctctttaaagcatgagacccaatatttttctgggcgtcagtga

SEQ ID NO: 103181 - DNA, 80 bp, synthetic construct
  source 1..80: mol_type = other DNA
ggagatgatctcttctcctatggatttgatggccttcatctctggtcaggtacgtactatccattttctttcaccgtgtt

SEQ ID NO: 103182 - DNA, 80 bp, synthetic construct
  source 1..80: mol_type = other DNA
attatagtacatttccaagggactgccgagcttgtgaacaatgctgtgtatttaaagagtagatttaaataagagtgtat

SEQ ID NO: 103183 - DNA, 80 bp, synthetic construct; identical to SEQ ID NO: 19803
  source 1..80: mol_type = other DNA

SEQ ID NO: 103184 - DNA, 80 bp, synthetic construct
  source 1..80: mol_type = other DNA
gagtttggttagctccatttaaaagcttagctcttgattatgtagattttttagatgttaaaattcatctggattctgca

SEQ ID NO: 103185 - DNA, 80 bp, synthetic construct
  source 1..80: mol_type = other DNA
tatggaagatgcagaaagttaccttaagttataaagctgaactttgcctcatgtggagtacaaatgatagacatttatga

SEQ ID NO: 103186 - DNA, 80 bp, synthetic construct
  source 1..80: mol_type = other DNA
actgaattctttcttcattgagtgccaatagctcagttgtctagacgagaggaagctgtattttgattttttgtgaattt

SEQ ID NO: 103187 - DNA, 80 bp, synthetic construct
  source 1..80: mol_type = other DNA
ggctaatttttatatatattttagtagagtcggggtttcaccatgctggccaggctcatcttgaattcctggtctcaagt

SEQ ID NO: 103188 - DNA, 80 bp, synthetic construct; identical to SEQ ID NO: 19804
  source 1..80: mol_type = other DNA

SEQ ID NO: 103189 - DNA, 80 bp, synthetic construct
  source 1..80: mol_type = other DNA
tactattaccccctctctccctagctcctagtattgctctgcaggaaataagtactcaaatgaataaatgaagcacgtgg

SEQ ID NO: 103190 - DNA, 80 bp, synthetic construct
  source 1..80: mol_type = other DNA
caatttgaagctttttctttcgatacattaaaagtacctggttcttatggaattgaattgtatgcgttataccttttatt

SEQ ID NO: 103191 - DNA, 80 bp, synthetic construct
  source 1..80: mol_type = other DNA
aggcctacagttgaaaagtattttctcttaagccactgggagtctattaaatgctttgctgattttagattcgtaattaa

SEQ ID NO: 103192 - DNA, 80 bp, synthetic construct; identical to SEQ ID NO: 19805
  source 1..80: mol_type = other DNA

SEQ ID NO: 103193 - DNA, 80 bp, synthetic construct
  source 1..80: mol_type = other DNA
gtggaggaatgtacaggaaagatgggtacaggtttctaatagagggtctataaagctatcgtatccctccaagtgaaaaa

SEQ ID NO: 103194 - DNA, 80 bp, synthetic construct
  source 1..80: mol_type = other DNA
tttattatattcagggaattctagaagagacacttgatagtgaatttattgcctgtggatttgaatattggtaaaataga

SEQ ID NO: 103195 - DNA, 80 bp, synthetic construct; identical to SEQ ID NO: 19806
  source 1..80: mol_type = other DNA

SEQ ID NO: 103196 - DNA, 80 bp, synthetic construct
  source 1..80: mol_type = other DNA
tagaccataggttggtcttgccggggcaataaataacatttatccaatatcattttcacacctccagttatatcctgctt

SEQ ID NO: 103197 - DNA, 80 bp, synthetic construct
  source 1..80: mol_type = other DNA
agggagtttagcatttgaaaaagggactgacatgaagtacctgctgtgcctgagactctgttacttgtaaaacattaatc

SEQ ID NO: 103198 - DNA, 80 bp, synthetic construct
  source 1..80: mol_type = other DNA
gctcatagataatttctggatcagttgccatccgtctacatgcagaagtttctgtgtatcagaaggtccattttacaaca

SEQ ID NO: 103199 - DNA, 80 bp, synthetic construct; identical to SEQ ID NO: 19807
  source 1..80: mol_type = other DNA

SEQ ID NO: 103200 - DNA, 80 bp, synthetic construct
  source 1..80: mol_type = other DNA
gcctcttctttccagtcgttagtttctctgcaggaataaagttagtatgtctatgttttttggtctctttcctttctcat

SEQ ID NO: 103201 - DNA, 80 bp, synthetic construct
  source 1..80: mol_type = other DNA
ttacggatcccacagtgtttagatgtgggcagtctccctcaaaccagggtcctgaactatttcaaggtgttttttttttt

SEQ ID NO: 103202 - DNA, 80 bp, synthetic construct
  source 1..80: mol_type = other DNA
ctcttatttcaatagaaattaaatatcctttttgttgatgaggcccagatggctttcttcagtgttcctctccaccttta

SEQ ID NO: 103203 - DNA, 80 bp, synthetic construct
  source 1..80: mol_type = other DNA
ccaagatggtttcctcacactctttccttttttgctattaccagagggaaacaaattaaagtgataatccattgtagttc

SEQ ID NO: 103204 - DNA, 80 bp, synthetic construct; identical to SEQ ID NO: 19808
  source 1..80: mol_type = other DNA

SEQ ID NO: 103205 - DNA, 80 bp, synthetic construct
  source 1..80: mol_type = other DNA
gccgaggtggaaggattgcttaaggtcaggagtttgtgaccagcctggtcaacacagtgagaccctatctctgcaaaagt

SEQ ID NO: 103206 - DNA, 80 bp, synthetic construct
  source 1..80: mol_type = other DNA
tgagaccttgacacacacaaaaaaagaattacgaggaaaatgaaaaatttaaatttatttttgtaaacccgagggcccca

SEQ ID NO: 103207 - DNA, 80 bp, synthetic construct
  source 1..80: mol_type = other DNA
gattgataaacaattagcgataaggttacctgctttcttcaagttgaagtgacatcagaatctcctttaaagcagcagtc

SEQ ID NO: 103208 - DNA, 80 bp, synthetic construct; identical to SEQ ID NO: 19809
  source 1..80: mol_type = other DNA

SEQ ID NO: 103209 - DNA, 80 bp, synthetic construct
  source 1..80: mol_type = other DNA
tcgtggcctgggggttggggcccctgcttcagagaatttcattaggaaattggacattgaaaagtgaccaagaaagtgaa

SEQ ID NO: 103210 - DNA, 80 bp, synthetic construct
  source 1..80: mol_type = other DNA
tactttgggactttaagtgaccagttattacggacatgcacttcattcccgtaagaatgtggtgcatgtgcttttggtta

SEQ ID NO: 103211 - DNA, 80 bp, synthetic construct
  source 1..80: mol_type = other DNA
tgttttaccttttacaattagaggcccttgaattctaaggtgatcacattatgatggtacgtaggggaaaatgtggcttc

SEQ ID NO: 103212 - DNA, 80 bp, synthetic construct
  source 1..80: mol_type = other DNA
gggtatgctccttgttatgaagctgttctgccaaaagaaaagttgaaagtggaacacagccgagagtacaagcaagaaag

SEQ ID NO: 103213 - DNA, 80 bp, synthetic construct; identical to SEQ ID NO: 19810
  source 1..80: mol_type = other DNA

SEQ ID NO: 103214 - DNA, 80 bp, synthetic construct
  source 1..80: mol_type = other DNA
tgcaacctctgcctcctgggttcaagcgattctcctgtctcagcctcccaagtagctgggattacaggcgcccaccacca

SEQ ID NO: 103215 - DNA, 80 bp, synthetic construct
  source 1..80: mol_type = other DNA
agtagttttcccaacccaataaactgattccctaatgtacgaacagattacaacctgaggtgttaaaaacactgttcaag

SEQ ID NO: 103216 - DNA, 80 bp, synthetic construct
  source 1..80: mol_type = other DNA
gagtcagcaaagggtggtggattatcattagctcttataggttttgggataggcagtgaagttaagagcaatattttgcg

SEQ ID NO: 103217 - DNA, 80 bp, synthetic construct
  source 1..80: mol_type = other DNA
caatggtggaatgtcatcagttaaggctatttttacttcttttgtggatcttcagttacttcaggccatctggatgtata

SEQ ID NO: 103218 - DNA, 80 bp, synthetic construct; identical to SEQ ID NO: 19811
  source 1..80: mol_type = other DNA

SEQ ID NO: 103219 - DNA, 80 bp, synthetic construct
  source 1..80: mol_type = other DNA
ctatgagactctaaggagaatatagagaaagatgaggatgccgtataggaaacatggagttttcaatttcttctcatttc

SEQ ID NO: 103220 - DNA, 80 bp, synthetic construct
  source 1..80: mol_type = other DNA
tcaccttctttactgggatgcttagagtatgtttgtcatagttaatagataccatattacttggcaaatagtcacccaac

SEQ ID NO: 103221 - DNA, 80 bp, synthetic construct; identical to SEQ ID NO: 19812
  source 1..80: mol_type = other DNA

SEQ ID NO: 103222 - DNA, 80 bp, synthetic construct
  source 1..80: mol_type = other DNA
atgaacaactagatgacatcatggtagaaacttaaggattacctgagacccagataacctctatcagggaaaggaaacag

SEQ ID NO: 103223 - DNA, 80 bp, synthetic construct
  source 1..80: mol_type = other DNA
tcttccttttaatgggaacatataaagattttgtttcttttctgtgaagcttatatttagaaaccactaacagtaacaga

SEQ ID NO: 103224 - DNA, 80 bp, synthetic construct; identical to SEQ ID NO: 19813
  source 1..80: mol_type = other DNA

SEQ ID NO: 103225 - DNA, 80 bp, synthetic construct
  source 1..80: mol_type = other DNA
tggctaacacggtgaaaccccgtctctactaaaaatacaaaaaaattagccgggcgtagtggtgggcacctgcattccca

SEQ ID NO: 103226 - DNA, 80 bp, synthetic construct
  source 1..80: mol_type = other DNA
aactttgttctatgattactggtttatgaggcagttttatttagttcaatttgcagtgaagactgttggcactgcatctt

SEQ ID NO: 103227 - DNA, 80 bp, synthetic construct
  source 1..80: mol_type = other DNA
aaaaactggcagagaatatccatgaactctgggttatgaataaaattgagcttggctggcagtatggtccggtatgtaat

SEQ ID NO: 103228 - DNA, 80 bp, synthetic construct; identical to SEQ ID NO: 19814
  source 1..80: mol_type = other DNA

SEQ ID NO: 103229 - DNA, 80 bp, synthetic construct
  source 1..80: mol_type = other DNA
atttacttttctctcgctcatgtttcttttctttcagttccaattgtgtgtaaaagcggaaacctgtgggcaagtgttcc

SEQ ID NO: 103230 - DNA, 80 bp, synthetic construct
  source 1..80: mol_type = other DNA
caaaaccatggtaatactttcatttgtatgatatattctaagtgtcccaaaggccataacactttcttatacctgactga

SEQ ID NO: 103231 - DNA, 80 bp, synthetic construct
  source 1..80: mol_type = other DNA
aggtcaaattgtcattacagtgaactgggttgtgttgttatttcagttgtactggtgatgacctagcggagagttcttgc

SEQ ID NO: 103232 - DNA, 80 bp, synthetic construct; identical to SEQ ID NO: 19815
  source 1..80: mol_type = other DNA

SEQ ID NO: 103233 - DNA, 80 bp, synthetic construct
  source 1..80: mol_type = other DNA
agcgattctcctgcttcagcctcccaagtagctggttttacaggcatgcaccaccacacgtggctaattttgtattttta

SEQ ID NO: 103234 - DNA, 80 bp, synthetic construct
  source 1..80: mol_type = other DNA
taaaagactggaccatctattagtcagtaggaagagagatgctacaaatgtgtaagtaatcaattgccagaggaattaca

SEQ ID NO: 103235 - DNA, 80 bp, synthetic construct
  source 1..80: mol_type = other DNA
atctccactgcaaactcctagtaagttcacctaagtggttatgttttgcagtggaaccttaggtgtgtttcttctttaag

SEQ ID NO: 103236 - DNA, 80 bp, synthetic construct
  source 1..80: mol_type = other DNA
tttttttttttttttttgagacggagtcttgctctgtcgcccaggctggagtgcagtggcgggatctcggctcactgcaa

SEQ ID NO: 103237 - DNA, 80 bp, synthetic construct; identical to SEQ ID NO: 19816
  source 1..80: mol_type = other DNA

SEQ ID NO: 103238 - DNA, 80 bp, synthetic construct
  source 1..80: mol_type = other DNA
caggaggtgttctctcatctaatgtatgatttgcagtctgcttcttttccaagaccttccctgaaactcctttttgtgta

SEQ ID NO: 103239 - DNA, 80 bp, synthetic construct
  source 1..80: mol_type = other DNA
tggattttttgaagaagaggaagttatcgttactttgggatatatttcccaggagtatggtgcaagggccctattttgtg

SEQ ID NO: 103240 - DNA, 80 bp, synthetic construct; identical to SEQ ID NO: 19817
  source 1..80: mol_type = other DNA

SEQ ID NO: 103241 - DNA, 80 bp, synthetic construct
  source 1..80: mol_type = other DNA
aggtaaatatttgatccaagactgagggatgtgtacaagatagctggcaatcagaaagcatgaccgtgtagtaggcagag

SEQ ID NO: 103242 - DNA, 80 bp, synthetic construct
  source 1..80: mol_type = other DNA
aagatgattttattctgtagggggctaaagagcattgaaaaatgcttagcaggaaggtgacagacttatgtctgctttca

SEQ ID NO: 103243 - DNA, 80 bp, synthetic construct
  source 1..80: mol_type = other DNA
gtagcaggagaaggaagggaatctgcgcagatttctggtttcattgagacacttgagaagatgatggtgttggttattct

SEQ ID NO: 103244 - DNA, 80 bp, synthetic construct
  source 1..80: mol_type = other DNA
tctgcaatcaaataagtatatctaatatatgattctatataagtcttgttcattcataatgatgaccagaaagaaaggaa

SEQ ID NO: 103245 - DNA, 80 bp, synthetic construct; identical to SEQ ID NO: 19818
  source 1..80: mol_type = other DNA

SEQ ID NO: 103246 - DNA, 80 bp, synthetic construct
  source 1..80: mol_type = other DNA
cagctagaaccacctcaaagtgtttatgtcagtcagtcctgtcgttaattgatgtctgtaatcagtttggttctatacag

SEQ ID NO: 103247 - DNA, 80 bp, synthetic construct
  source 1..80: mol_type = other DNA
gtgcctaggacataccaggcatgtttaaggtgtttgggacacatcaaagaacaaaagagaccaaaatctttgcatttttg

SEQ ID NO: 103248 - DNA, 80 bp, synthetic construct; identical to SEQ ID NO: 19819
  source 1..80: mol_type = other DNA

SEQ ID NO: 103249 - DNA, 80 bp, synthetic construct
  source 1..80: mol_type = other DNA
gtttcttcttgccttctgcctccactttctaccacacagttgaattccattgctagtgcctggcattggagactatttta

SEQ ID NO: 103250 - DNA, 80 bp, synthetic construct
  source 1..80: mol_type = other DNA
tgaacaggagcgcaattacaacttacaaatgtcgcttgagaccctgaagtgagtttcttaactttttctattttccaacc

SEQ ID NO: 103251 - DNA, 80 bp, synthetic construct
  source 1..80: mol_type = other DNA
tatgtcctcttgttctacatcagtattttgcaaagggtgtcctacaggtgtatatgggtattatggatgatgaggatttt

SEQ ID NO: 103252 - DNA, 80 bp, synthetic construct
  source 1..80: mol_type = other DNA
taccaatttagggaagcaattttacatatattgaatctaatgatttaagaaatgtgaggtcatagcctgtatgtcttcat

SEQ ID NO: 103253 - DNA, 80 bp, synthetic construct
  source 1..80: mol_type = other DNA
aaaattttttgctgatggacttttcagaactttggggtgaagtctgtttatggtatttcctaaactgatttcaccatagc

SEQ ID NO: 103254 - DNA, 80 bp, synthetic construct; identical to SEQ ID NO: 19820
  source 1..80: mol_type = other DNA

SEQ ID NO: 103255 - DNA, 80 bp, synthetic construct
  source 1..80: mol_type = other DNA
tggattgagcctgggagattgaggctccagtgagctgtgatcacgccactgcactccagcctggatgacagagcaggacc

SEQ ID NO: 103256 - DNA, 80 bp, synthetic construct
  source 1..80: mol_type = other DNA
taggactacaggagcttgccactgcatccagcctgagcacatattttgagaaaagctactgtagagtattttatatcacc

SEQ ID NO: 103257 - DNA, 80 bp, synthetic construct
  source 1..80: mol_type = other DNA
agtaactttactcttgtcctccttccatccttgatgtcctacagaactggatttgttccaataggtcacttatcctaata

SEQ ID NO: 103258 - DNA, 80 bp, synthetic construct; identical to SEQ ID NO: 19821
  source 1..80: mol_type = other DNA

SEQ ID NO: 103259 - DNA, 80 bp, synthetic construct
  source 1..80: mol_type = other DNA
cttaccattgtgttacagttgtctacagtatttggtgaagtaacatgtacaagtttgtagcctagcagcaataggctata

SEQ ID NO: 103260 - DNA, 80 bp, synthetic construct
  source 1..80: mol_type = other DNA
aagtgatgtataactctatatcctcaaggatgcagattatcatgtaaataaacacattaggcataagattgagcttaggg

SEQ ID NO: 103261 - DNA, 80 bp, synthetic construct
  source 1..80: mol_type = other DNA
tacgtggattcagcatctctgatcttcctttgcgctcttgacatgaggcttgtatatttagcttagtaattcatagcagc

SEQ ID NO: 103262 - DNA, 80 bp, synthetic construct; identical to SEQ ID NO: 19822
  source 1..80: mol_type = other DNA

SEQ ID NO: 103263 - DNA, 80 bp, synthetic construct
  source 1..80: mol_type = other DNA
aaacatctgtacttctctaagattcataccatgcccaattccaagggtttagagaaagtacagtactttcttcctatatt

SEQ ID NO: 103264 - DNA, 80 bp, synthetic construct
  source 1..80: mol_type = other DNA
tcaactcctctgaaccctaggttttcttctccttagtagaatgaggatcataatgtatttgcttcatggaattattatag

SEQ ID NO: 103265 - DNA, 80 bp, synthetic construct
  source 1..80: mol_type = other DNA
tacatctttagaagttccaagtaacaaataagcaagaaattattccagaatatcccttattttgggttgaggagcaattt

SEQ ID NO: 103266 - DNA, 80 bp, synthetic construct; identical to SEQ ID NO: 19823
  source 1..80: mol_type = other DNA

SEQ ID NO: 103267 - DNA, 80 bp, synthetic construct
  source 1..80: mol_type = other DNA
aattatttttagatgatgtagtgtgcttgtgcacgtatgtggtgaaggatgggaggaatagtagggacccaggacacagg

SEQ ID NO: 103268 - DNA, 80 bp, synthetic construct
  source 1..80: mol_type = other DNA
tccctttttttccttccttccttccttccttccctcccctccttctccttcttctcttcctccttctttctccttcccct

SEQ ID NO: 103269 - DNA, 80 bp, synthetic construct; identical to SEQ ID NO: 19824
  source 1..80: mol_type = other DNA

SEQ ID NO: 103270 - DNA, 80 bp, synthetic construct
  source 1..80: mol_type = other DNA
cactgcaacctctgcctcccagattcaagtgattctcctgcctcagcctcccgagtagctgggattacaggcacctgcca

SEQ ID NO: 103271 - DNA, 80 bp, synthetic construct
  source 1..80: mol_type = other DNA
tcccaagttctaaatgttgtgaatctttatgttcagtcctgggccatttcttctcagtgtgcaagctctctgaaggtatt

SEQ ID NO: 103272 - DNA, 80 bp, synthetic construct
  source 1..80: mol_type = other DNA
agctttatgtcccctgtatttgcatttagggtgttgagtctttcaacatgccaggctattcatcctgctacacatgccag

SEQ ID NO: 103273 - DNA, 80 bp, synthetic construct; identical to SEQ ID NO: 19825
  source 1..80: mol_type = other DNA

SEQ ID NO: 103274 - DNA, 80 bp, synthetic construct
  source 1..80: mol_type = other DNA
tgttccctttgcctggaaaattcttcatttcacccttaaaggatctcctccctactcatccctcaggccttcatttaaat

SEQ ID NO: 103275 - DNA, 80 bp, synthetic construct
  source 1..80: mol_type = other DNA
tgggccacattggaagaattatcttgggccacacacaaaatacactaacactaatgatagctgatgaactaaaacacaaa

SEQ ID NO: 103276 - DNA, 80 bp, synthetic construct
  source 1..80: mol_type = other DNA
gcagatttaggttctcagcaaagttaaaagaaagatacagagacttttcttatgccccctgtttccacaggcaactgccc

SEQ ID NO: 103277 - DNA, 80 bp, synthetic construct
  source 1..80: mol_type = other DNA
attgcaaatgtacctcaaactttgtgacttttttataccttcaaatctcaggctcctttcagtgtccttctcttgttgtg

SEQ ID NO: 103278 - DNA, 80 bp, synthetic construct; identical to SEQ ID NO: 19826
  source 1..80: mol_type = other DNA

SEQ ID NO: 103279 - DNA, 80 bp, synthetic construct
  source 1..80: mol_type = other DNA
gtaatttctcatcatctactcccttccaatcccctcactcttccaagtctccatgaattgtcattctactctctatgtcc

SEQ ID NO: 103280 - DNA, 80 bp, synthetic construct
  source 1..80: mol_type = other DNA
tgtatatatgccacattttctttatccattcatccattgatggacacttaggttccttccatttctttgctgatgtgaat

SEQ ID NO: 103281 - DNA, 80 bp, synthetic construct; identical to SEQ ID NO: 19827
  source 1..80: mol_type = other DNA

SEQ ID NO: 103282 - DNA, 80 bp, synthetic construct
  source 1..80: mol_type = other DNA
gtttttaaggagactatttgatgcttttcttgttgttgaattgtttgtttcttgcatattctggatgaatgagtagtttg

SEQ ID NO: 103283 - DNA, 80 bp, synthetic construct
  source 1..80: mol_type = other DNA
tttgtttttgttgcctgggtttttgacgtcttagtcataaattctttgcctagacaaatgttcagaagagttttccctag

SEQ ID NO: 103284 - DNA, 80 bp, synthetic construct
  source 1..80: mol_type = other DNA
cagttttcccagcaacatgtattgaagagtgtatcctttctccaatgtatgctcttgttggctttgtgaaagccaacaaa

SEQ ID NO: 103285 - DNA, 80 bp, synthetic construct; identical to SEQ ID NO: 19828
  source 1..80: mol_type = other DNA

SEQ ID NO: 103286 - DNA, 80 bp, synthetic construct
  source 1..80: mol_type = other DNA
agatcttgtacacctccttggttaaatatattttaattaggtattttaggtatttcaatgaggtattttaatttttatgt

SEQ ID NO: 103287 - DNA, 80 bp, synthetic construct
  source 1..80: mol_type = other DNA
ttatcaaataagagttttttgtggcatctttaggttttccttgacataagatcaaattgtcagcaaacaaggataattag

SEQ ID NO: 103288 - DNA, 80 bp, synthetic construct
  source 1..80: mol_type = other DNA
aatgttagctgtgagattgttgtatatggcctttattattttgaggtatgctccttctatcccttgtttatggagagttc

SEQ ID NO: 103289 - DNA, 80 bp, synthetic construct; identical to SEQ ID NO: 19829
  source 1..80: mol_type = other DNA

SEQ ID NO: 103290 - DNA, 80 bp, synthetic construct
  source 1..80: mol_type = other DNA
caactttattaaaaatacaaaaattagctgggtgtgatggtgcacaccagtaatcccagctactcaaggaggctgaggca

SEQ ID NO: 103291 - DNA, 80 bp, synthetic construct
  source 1..80: mol_type = other DNA
tacagatgaattatacctaacatacatagaactaatatcaatcctcctgaaactgtttcaaaaagtcaaggagcaggaaa

SEQ ID NO: 103292 - DNA, 80 bp, synthetic construct
  source 1..80: mol_type = other DNA
ttctgtactttgtagccagtgtgttcatttcaaacattaaggtgaccatgtcaatctttctatttaaaatcccttaatgg

SEQ ID NO: 103293 - DNA, 80 bp, synthetic construct
  source 1..80: mol_type = other DNA
accctgtctctactaaaattataaaaattagccaagcgtcatggcaggtgcctgtaatcccagctgctcgggaggctgag

SEQ ID NO: 103294 - DNA, 80 bp, synthetic construct; identical to SEQ ID NO: 19830
  source 1..80: mol_type = other DNA

SEQ ID NO: 103295 - DNA, 80 bp, synthetic construct
  source 1..80: mol_type = other DNA
gcaggttaaatatgtatacatgtgccatgttggtgtgctgcacccattaactcgtcatttaacattagctatatctccta

SEQ ID NO: 103296 - DNA, 80 bp, synthetic construct
  source 1..80: mol_type = other DNA
gggccatagcagaaaaagaattgtcttgggccacacataaaatacactataatactaacaatagctgatgagctaaattt

SEQ ID NO: 103297 - DNA, 80 bp, synthetic construct
  source 1..80: mol_type = other DNA
tctgagttccttgactcaacaattttacttctataggtactcatcctttctgtactcccagtatagaagctttccctgtg

SEQ ID NO: 103298 - DNA, 80 bp, synthetic construct; identical to SEQ ID NO: 19831
  source 1..80: mol_type = other DNA

SEQ ID NO: 103299 - DNA, 80 bp, synthetic construct
  source 1..80: mol_type = other DNA
cccttattttgtgcttttctagcctttctatcagctttgcagttccaacttatagtgtgctgtttctctcaccacccttc

SEQ ID NO: 103300 - DNA, 80 bp, synthetic construct
  source 1..80: mol_type = other DNA
aaaacctcctaggattgggcaaagagtacttagatacaatatccaaaacatgacctattaaagaaaacagtccatccatt

SEQ ID NO: 103301 - DNA, 80 bp, synthetic construct; identical to SEQ ID NO: 19832
  source 1..80: mol_type = other DNA

SEQ ID NO: 103302 - DNA, 80 bp, synthetic construct
  source 1..80: mol_type = other DNA
ttgggtggctcacttgaggtctgaagttagaaaccagcctggccaacatggtgaaactccatctctactaaaaatacaaa

SEQ ID NO: 103303 - DNA, 80 bp, synthetic construct
  source 1..80: mol_type = other DNA
aaaaaggcaaaaattggcaaaatactttaccaaagaagatacacagatggctaataaagtgcaatcaaggatgttacaca

SEQ ID NO: 103304 - DNA, 80 bp, synthetic construct
  source 1..80: mol_type = other DNA
tttggaaaatagtttggaagtttcttaaaaagttaaacataaacttaccatagcctagcaattctactcctatgtatcta

SEQ ID NO: 103305 - DNA, 80 bp, synthetic construct
  source 1..80: mol_type = other DNA
taaaaggaaacaaactactgccacagactccaacatggatcaacctgaaaaactttatgccaggtggaaggagccaaaca

SEQ ID NO: 103306 - DNA, 80 bp, synthetic construct; identical to SEQ ID NO: 19833
  source 1..80: mol_type = other DNA

SEQ ID NO: 103307 - DNA, 80 bp, synthetic construct
  source 1..80: mol_type = other DNA
atagcatatgaggccctcacttaatgtcttaatcagggttcttgagataaacagaaccaacagggtgtatgtatgtgtgt

SEQ ID NO: 103308 - DNA, 80 bp, synthetic construct
  source 1..80: mol_type = other DNA
ttttttctgttgagacctttcactgattagttgaggcccagtcacattatggaaggtagtctgatttacttaaagtgcac

SEQ ID NO: 103309 - DNA, 80 bp, synthetic construct; identical to SEQ ID NO: 19834
  source 1..80: mol_type = other DNA

SEQ ID NO: 103310 - DNA, 80 bp, synthetic construct
  source 1..80: mol_type = other DNA
tttcgtggctgtatagttttccatggtgtatatgtaccatattttctttttgcagtcaacagttgacagacacttaagtt

SEQ ID NO: 103311 - DNA, 80 bp, synthetic construct
  source 1..80: mol_type = other DNA
aggttcaagcaattctcctgccacagcctcccaagtagctgggattacaggtgtccaccaccacgcctggctaatttttg

SEQ ID NO: 103312 - DNA, 80 bp, synthetic construct
  source 1..80: mol_type = other DNA
agcctggccaacatggtgcaaacccatctctactaaaaatacaaaaattagctgggtatggtggtgagcacctgtaacct

SEQ ID NO: 103313 - DNA, 80 bp, synthetic construct; identical to SEQ ID NO: 19835
  source 1..80: mol_type = other DNA

SEQ ID NO: 103314 - DNA, 80 bp, synthetic construct
  source 1..80: mol_type = other DNA
cagatcattttttaatgtgtttatttggctgcttgtatttcctcttttgagaaatgtctatttatgtccttttttctttc

SEQ ID NO: 103315 - DNA, 80 bp, synthetic construct
  source 1..80: mol_type = other DNA
gcctgattaaactttgaattatgtgtagagacagagtctccctatgttacccagactggtcttgaactcctgggctcaag

SEQ ID NO: 103316 - DNA, 80 bp, synthetic construct
  source 1..80: mol_type = other DNA
tttgaagatactttctcccattctgtaggttgtctatttactctgtagattattttgctgtgcagatgctttttagtttg

SEQ ID NO: 103317 - DNA, 80 bp, synthetic construct; identical to SEQ ID NO: 19836
  source 1..80: mol_type = other DNA

SEQ ID NO: 103318 - DNA, 80 bp, synthetic construct
  source 1..80: mol_type = other DNA
aatgtgatgcctctggatttgttcattttgcttaggattgccttggctattcggactcttttttgattccatgtgaactc

SEQ ID NO: 103319 - DNA, 80 bp, synthetic construct
  source 1..80: mol_type = other DNA
ccccaaacttaccccagtatttctttttacccttaacctatagtacacggtcagatcttaatactccagtcaacccttct

SEQ ID NO: 103320 - DNA, 80 bp, synthetic construct
  source 1..80: mol_type = other DNA
tctaaaacatgtaactttttaaaatgtggaaccctacttggttttattataattcttcagtcatcatcttttctcctatc

SEQ ID NO: 103321 - DNA, 80 bp, synthetic construct; identical to SEQ ID NO: 19837
  source 1..80: mol_type = other DNA

SEQ ID NO: 103322 - DNA, 80 bp, synthetic construct
  source 1..80: mol_type = other DNA
aagggaagaaaaatactgtatactgaagttgctaagatctataaaaacaacaattcttctgtctgtgaaattgtgagcag

SEQ ID NO: 103323 - DNA, 80 bp, synthetic construct
  source 1..80: mol_type = other DNA
gtatgtatcatagtatgtatggataggaaaaagtatagggtttggtactatctgtggggttcaggcatccactgggagtc

SEQ ID NO: 103324 - DNA, 80 bp, synthetic construct
  source 1..80: mol_type = other DNA
cactgtccgtgtgagttgaattcatacttttctaggtagtttgcattgggaagaagattatgaggctgaattaattagtt

SEQ ID NO: 103325 - DNA, 80 bp, synthetic construct; identical to SEQ ID NO: 19838
  source 1..80: mol_type = other DNA

SEQ ID NO: 103326 - DNA, 80 bp, synthetic construct
  source 1..80: mol_type = other DNA
tggacatccctctttgatacttttacagccttgtgattacctcattgccctgaagatactatcataattgcctgttgtct

SEQ ID NO: 103327 - DNA, 80 bp, synthetic construct
  source 1..80: mol_type = other DNA
gatcaatccctttcaacgtgcacattctttattcagcttattttgtaccttcaatcagctcttggtcttcccatagtttt

SEQ ID NO: 103328 - DNA, 80 bp, synthetic construct
  source 1..80: mol_type = other DNA
gtgtatagatggatagatacccatatgtataagcttatatgtatctgtctaaatggttaagcttatacatatagatactt

SEQ ID NO: 103329 - DNA, 80 bp, synthetic construct; identical to SEQ ID NO: 19839
  source 1..80: mol_type = other DNA

SEQ ID NO: 103330 - DNA, 80 bp, synthetic construct
  source 1..80: mol_type = other DNA
gatgcctttagaggaaggaaacagaattagaagaagttggagggagacttacttttcagtgtattcctttttgtgccatt

SEQ ID NO: 103331 - DNA, 80 bp, synthetic construct
  source 1..80: mol_type = other DNA
gatcgagaccatcctggctaacacggtgaaaccccgtctctactaaaaatacaaaaaattagccgggtgtggtggcgggc

SEQ ID NO: 103332 - DNA, 80 bp, synthetic construct
  source 1..80: mol_type = other DNA
atctcattgctactgctgctgtcttgggttattctggacatagagaagaaatgatcacacttatctctggttttgttttc

SEQ ID NO: 103333 - DNA, 80 bp, synthetic construct; identical to SEQ ID NO: 19840
  source 1..80: mol_type = other DNA

SEQ ID NO: 103334 - DNA, 80 bp, synthetic construct
  source 1..80: mol_type = other DNA
cctgtaatcccagctactcgggaggctgagacaggagaatcgcttgaacttgggaggcagaggctgcagtgagtcaagat

SEQ ID NO: 103335 - DNA, 80 bp, synthetic construct
  source 1..80: mol_type = other DNA
ttttcccagtgtgtgtttatatgttaacagaggtatccatatttctaaatgattacatatagctttctactttctgccca

SEQ ID NO: 103336 - DNA, 80 bp, synthetic construct
  source 1..80: mol_type = other DNA
ggttcacttaagacctcacctttctcatctgcctgtgggcattagtaatacctacttaacagggaagttttaggtattaa

SEQ ID NO: 103337 - DNA, 80 bp, synthetic construct; identical to SEQ ID NO: 19841
  source 1..80: mol_type = other DNA

SEQ ID NO: 103338 - DNA, 80 bp, synthetic construct
  source 1..80: mol_type = other DNA
cattttgcatatttacatttcaaaatgacactttttcatcaactttgagtgtatcttatgagcacagaccacagtgttca

SEQ ID NO: 103339 - DNA, 80 bp, synthetic construct
  source 1..80: mol_type = other DNA
tatcctacattataagtaagatatgtatctaaattgaatttttaattgtttttgttttctgcgatcatagtcattaagtt

SEQ ID NO: 103340 - DNA, 80 bp, synthetic construct
  source 1..80: mol_type = other DNA
cacgtacaaataatatttattgatagagtcaagttggcagagtggttgcattcttcgttcacataaataatttttgttat

SEQ ID NO: 103341 - DNA, 80 bp, synthetic construct; identical to SEQ ID NO: 19842
  source 1..80: mol_type = other DNA

SEQ ID NO: 103342 - DNA, 80 bp, synthetic construct
  source 1..80: mol_type = other DNA
aagtagaaatgttaatttcacattatctttgacagcataatacatttaatcaattgtatcaaatgctatgcgtgagtgtg

SEQ ID NO: 103343 - DNA, 80 bp, synthetic construct
  source 1..80: mol_type = other DNA
tgaaacaaatgggttaatacatgtccccatgacaatcatctcaattccaatttctaactttaagataggtagatgataga

SEQ ID NO: 103344 - DNA, 80 bp, synthetic construct
  source 1..80: mol_type = other DNA
ctctcacaacgcaacacagcaattatttgagagtgggtgaagatatggaaaagctgagacccttaaatgaaaactatact

SEQ ID NO: 103345 - DNA, 80 bp, synthetic construct; identical to SEQ ID NO: 19843
  source 1..80: mol_type = other DNA

SEQ ID NO: 103346 - DNA, 80 bp, synthetic construct
  source 1..80: mol_type = other DNA
tgacaccatagatgaacctaaaaaataataagggtgtaaaaaacattctacaagggtgatgcaatgtaaaaccatctttg

SEQ ID NO: 103347 - DNA, 80 bp, synthetic construct
  source 1..80: mol_type = other DNA
ttggtataaatataggcagggatgtaagatggggagcaacacacagatagatgtaatgttagtaatgttctaattgttaa

SEQ ID NO: 103348 - DNA, 80 bp, synthetic construct
  source 1..80: mol_type = other DNA
cattagtcataacaaatgtacatggtttaaattctccatgtgcgtaacagaaattgtcagattggattcaaaaagataat

SEQ ID NO: 103349 - DNA, 80 bp, synthetic construct; identical to SEQ ID NO: 19844
  source 1..80: mol_type = other DNA

SEQ ID NO: 103350 - DNA, 80 bp, synthetic construct
  source 1..80: mol_type = other DNA
agcttgacatatatagagtgctgcatgcatgaaacatttataaaatttagtatcctttaggacattagacactgatatcg

SEQ ID NO: 103351 - DNA, 80 bp, synthetic construct
  source 1..80: mol_type = other DNA
taaaaagataacccatatttcttgatcttgctaaatgaacctatccttttttcatgcctttatactcttataaatggatg

SEQ ID NO: 103352 - DNA, 80 bp, synthetic construct
  source 1..80: mol_type = other DNA
tattacctcacataatccctttttattttgtgagaacacttaaaatcaaatctcttggcaagttcaatatataatacctc

SEQ ID NO: 103353 - DNA, 80 bp, synthetic construct; identical to SEQ ID NO: 19845
  source 1..80: mol_type = other DNA

SEQ ID NO: 103354 - DNA, 80 bp, synthetic construct
  source 1..80: mol_type = other DNA
cacacacacacacacgtcccaaacaacttttctattgatttctaccaaatacaatctcacataaagaggaagaaacactt

SEQ ID NO: 103355 - DNA, 80 bp, synthetic construct
  source 1..80: mol_type = other DNA
gaccaagctgagtttatcctagtagtgaaaagataggttaacattagaaaatgtatccattaaattgatgcttaataaag

SEQ ID NO: 103356 - DNA, 80 bp, synthetic construct; identical to SEQ ID NO: 19846
  source 1..80: mol_type = other DNA

SEQ ID NO: 103357 - DNA, 80 bp, synthetic construct
  source 1..80: mol_type = other DNA
ttctgcacttgatgttatttatgtttcatgtcctctaatctgaaatatgcacttgctaaaggaaaaaaatctgtgcatca

SEQ ID NO: 103358 - DNA, 80 bp, synthetic construct
  source 1..80: mol_type = other DNA
cagcactttgggaggccgaggcgggcggatcacgaggtcaggagatcgagaccatcctggctaacatggtgaaaccccgt

SEQ ID NO: 103359 - DNA, 80 bp, synthetic construct
  source 1..80: mol_type = other DNA
gattccgtctcaaaaaaaaaaaaaaaaaaaaaattagccgggcatggtggcaggcgcctgtagtcccagctactagggag

SEQ ID NO: 103360 - DNA, 80 bp, synthetic construct
  source 1..80: mol_type = other DNA
ccaaatagaaaaatgagcaaaggatatgaacataattcataaaaaacccctgcagatccaataagcatatgaaagacact

SEQ ID NO: 103361 - DNA, 80 bp, synthetic construct; identical to SEQ ID NO: 19847
  source 1..80: mol_type = other DNA

SEQ ID NO: 103362 - DNA, 80 bp, synthetic construct
  source 1..80: mol_type = other DNA
agcaattctcctgcctcagcctccctagtacaggcgcccgccaccacgcccagctaatttttgtattttttagtagagac

SEQ ID NO: 103363 - DNA, 80 bp, synthetic construct
  source 1..80: mol_type = other DNA
aaatgaattaactatagctagatagattcaaaggacaaatctcaaaaatactccttagagccaaaaaacaaaaaaagcat

SEQ ID NO: 103364 - DNA, 80 bp, synthetic construct; identical to SEQ ID NO: 19848
  source 1..80: mol_type = other DNA

SEQ ID NO: 103365 - DNA, 80 bp, synthetic construct
  source 1..80: mol_type = other DNA
gttcgagaccagcctgggcaacatggtgaaaccccgtctctactaaaaataaaaaaaaaaaattagccaggcatggtggt

SEQ ID NO: 103366 - DNA, 80 bp, synthetic construct
  source 1..80: mol_type = other DNA
aaaagggaagatggtattgatggtattcgtttcagaaggaaatggtgtttaaagaagtttttttttggccaggcctggtg

SEQ ID NO: 103367 - DNA, 80 bp, synthetic construct
  source 1..80: mol_type = other DNA
ggtaggctgagccaggaaaattgcttgaacctgagaggcggaggttgctgtgagccaagatcataccactgcactccagc

SEQ ID NO: 103368 - DNA, 80 bp, synthetic construct; identical to SEQ ID NO: 19849
  source 1..80: mol_type = other DNA

SEQ ID NO: 103369 - DNA, 80 bp, synthetic construct
  source 1..80: mol_type = other DNA
aatgttcacaagaagattaattttgggttaaaatcttgataagaaccagtattgttttctaccaggtttacctctgtcat

SEQ ID NO: 103370 - DNA, 80 bp, synthetic construct
  source 1..80: mol_type = other DNA
ttttaagttgcttttgtgtaactattagaaatatggtcgattcctacacgcaacccttgggctatggtctatgaaagagc

SEQ ID NO: 103371 - DNA, 80 bp, synthetic construct
  source 1..80: mol_type = other DNA
ctatattccctattaaaaatagctaatttttgtactgtgcagccagtggagccggaaatcattatcctcaataaactaat

SEQ ID NO: 103372 - DNA, 80 bp, synthetic construct
  source 1..80: mol_type = other DNA
cttcacacgtagttgatgggttgataggtgcagcaaaccaccatggcacacgtttacctatgtaacctgcacatcctgca

SEQ ID NO: 103373 - DNA, 80 bp, synthetic construct; identical to SEQ ID NO: 19850
  source 1..80: mol_type = other DNA

SEQ ID NO: 103374 - DNA, 80 bp, synthetic construct
  source 1..80: mol_type = other DNA
ccaagagcttgtggtcctcactatctcatatgcctaattgagtgtttgagattgttcgaaaagctgtagatttaaatgaa

SEQ ID NO: 103375 - DNA, 80 bp, synthetic construct
  source 1..80: mol_type = other DNA
cgagaccagcctggccaacatggtgaaactctgtctctactaaaaatacaaaaattagccacgcatggtggcaggtgcct

SEQ ID NO: 103376 - DNA, 80 bp, synthetic construct; identical to SEQ ID NO: 19851
  source 1..80: mol_type = other DNA

SEQ ID NO: 103377 - DNA, 80 bp, synthetic construct
  source 1..80: mol_type = other DNA
atactgaatgtgtacccgtatgtatactgtttacatagacacaagcacatgtacaaaattcactttggtaaatatttacc

SEQ ID NO: 103378 - DNA, 80 bp, synthetic construct
  source 1..80: mol_type = other DNA
tttctctgattgggcctaatttaggatttaaatccaatgagccttgtagccagaatgcagcctgacagtgataaattaat

SEQ ID NO: 103379 - DNA, 80 bp, synthetic construct; identical to SEQ ID NO: 19852
  source 1..80: mol_type = other DNA

SEQ ID NO: 103380 - DNA, 80 bp, synthetic construct
  source 1..80: mol_type = other DNA
cgaaaagagagtcagcgaagggagataagggtggtgccattttataggatttgggtagataaaggaaaattacagtcaaa

SEQ ID NO: 103381 - DNA, 80 bp, synthetic construct
  source 1..80: mol_type = other DNA
gaccggccattttcacttcttttgtggtggaatgtcatcagttaaggcggggcagggcattttcacttcttttgtgattc

SEQ ID NO: 103382 - DNA, 80 bp, synthetic construct
  source 1..80: mol_type = other DNA
ttattttgagacagagtttcactcttgttgcccaggctggagtgcgatggcgccatctcggctcaccgcaagctccgcct

SEQ ID NO: 103383 - DNA, 80 bp, synthetic construct; identical to SEQ ID NO: 19853
  source 1..80: mol_type = other DNA

SEQ ID NO: 103384 - DNA, 80 bp, synthetic construct
  source 1..80: mol_type = other DNA
tgtcttcattcatctctgctggcattttacaggatgtttgtgttctgcactgatttgatattgggttcacattgggtgcc

SEQ ID NO: 103385 - DNA, 80 bp, synthetic construct
  source 1..80: mol_type = other DNA
ttgtcaccatatctgtactgttcatgggtttggatctgtgaaattatgagaccctgccatttggctgagtacaatatagg

SEQ ID NO: 103386 - DNA, 80 bp, synthetic construct
  source 1..80: mol_type = other DNA
tgtcctaaggcataagggctttgttcctttggtattcaaaagcagagattttaatatcacaaggccctgctataaagatc

SEQ ID NO: 103387 - DNA, 80 bp, synthetic construct
  source 1..80: mol_type = other DNA
aaaaaggagtttggggtcaggggagtagggcacatcttcatattacatgtttttatttaaaaacaaacaaaagtaaaaaa

SEQ ID NO: 103388 - DNA, 80 bp, synthetic construct; identical to SEQ ID NO: 19854
  source 1..80: mol_type = other DNA

SEQ ID NO: 103389 - DNA, 80 bp, synthetic construct
  source 1..80: mol_type = other DNA
taacttgatccatattaaacaagtaagcttgggaggtgggggtggcttaaaaaaaacaaaaggttggtgcttactgtttt

SEQ ID NO: 103390 - DNA, 80 bp, synthetic construct
  source 1..80: mol_type = other DNA
ccccagtggagccaaacactgtcaattttttgtttatatctttggtgacttgatgcaaatagaatcgacagttggccagg

SEQ ID NO: 103391 - DNA, 80 bp, synthetic construct
  source 1..80: mol_type = other DNA
tttattttattaaattatgtagttgccaaaataaaactaagagctaataactataaaagtattttgatactttgtaaagt

SEQ ID NO: 103392 - DNA, 80 bp, synthetic construct; identical to SEQ ID NO: 19855
  source 1..80: mol_type = other DNA

SEQ ID NO: 103393 - DNA, 80 bp, synthetic construct
  source 1..80: mol_type = other DNA
attttacttgaaagtgttcagtttctggttcatgtcaattacatttgattcaaaggctttgttcatttttaaccacaaga

SEQ ID NO: 103394 - DNA, 80 bp, synthetic construct
  source 1..80: mol_type = other DNA
caaacagaaaattcgtttcataaattattgctgttaccattaattcatactggtgaaacattcatgatgtcaatagtgtt

SEQ ID NO: 103395 - DNA, 80 bp, synthetic construct
  source 1..80: mol_type = other DNA
acaattctaagcttcaaatcctttctcgtacaaggttatagaggaaagaaggttaaaaaagtgtagtttacatctgaaga

SEQ ID NO: 103396 - DNA, 80 bp, synthetic construct; identical to SEQ ID NO: 19856
  source 1..80: mol_type = other DNA

SEQ ID NO: 103397 - DNA, 80 bp, synthetic construct
  source 1..80: mol_type = other DNA
aggtggatatcgaaacttcatcatctgtgtggcctctgtggctgctagatgggatcaaggctgctgaaaagtgaaagaag

SEQ ID NO: 103398 - DNA, 80 bp, synthetic construct
  source 1..80: mol_type = other DNA
agcaaactgttaaacttggaaattagactatgctagcttgattacctgttggtgcatttgaaatgcagtgggagcttttt

SEQ ID NO: 103399 - DNA, 80 bp, synthetic construct
  source 1..80: mol_type = other DNA
aaaaataaaacccaaaaccataaatatataatatgtaaaatatatatattaatgttttgggttttttttaatttaaatac

SEQ ID NO: 103400 - DNA, 80 bp, synthetic construct; identical to SEQ ID NO: 19857
  source 1..80: mol_type = other DNA

SEQ ID NO: 103401 - DNA, 80 bp, synthetic construct
  source 1..80: mol_type = other DNA
tgttgtttttttgagacagagtctcgccgtgtcacccaggccagagtgcagtggcacaatctcggctcactgcaacctct

SEQ ID NO: 103402 - DNA, 80 bp, synthetic construct
  source 1..80: mol_type = other DNA
acctgcctcggcctcccaaagtgctgggattatagaagtgagctaccaagcccagcctatacataaattacttacaatat

SEQ ID NO: 103403 - DNA, 80 bp, synthetic construct
  source 1..80: mol_type = other DNA
tgaataaaatggacaaactccctgctttcaaggagcttgccttgtaatgatgccagtcatagcccagattagtagtctat

SEQ ID NO: 103404 - DNA, 80 bp, synthetic construct; identical to SEQ ID NO: 19858
  source 1..80: mol_type = other DNA

SEQ ID NO: 103405 - DNA, 80 bp, synthetic construct
  source 1..80: mol_type = other DNA
ccttttctcacatttatttttaaaagcattttctcatgttttaataattaattttgtaacttagcataattacctagtga

SEQ ID NO: 103406 - DNA, 80 bp, synthetic construct
  source 1..80: mol_type = other DNA
gttagaaaaatgaatcagaaacagatcctgacctcaaggtatagtcaataatggagaatacaacagtgacagaagaatgg

SEQ ID NO: 103407 - DNA, 80 bp, synthetic construct
  source 1..80: mol_type = other DNA
atacctgttttattacgataataccttctctctccagcctagaatgtagaagcagtctctgctaagagatccttgaactc

SEQ ID NO: 103408 - DNA, 80 bp, synthetic construct
  source 1..80: mol_type = other DNA
taggtagtatctgaaggatacactgatttatgaaataaatattacattaatctaacatttaacaattgaagaaaaatgac

SEQ ID NO: 103409 - DNA, 80 bp, synthetic construct; identical to SEQ ID NO: 19859
  source 1..80: mol_type = other DNA

SEQ ID NO: 103410 - DNA, 80 bp, synthetic construct
  source 1..80: mol_type = other DNA
tatggacctgagctttatcaaactcaccccatcacaagaagcaatggtggacaagttggcagaaaatgcacataatgtgt

SEQ ID NO: 103411 - DNA, 80 bp, synthetic construct
  source 1..80: mol_type = other DNA
atagtgcacatttggactaaaacagctgtttaatgctagactcaagaatttacatgaccttagttctggctgtgatcgtg

SEQ ID NO: 103412 - DNA, 80 bp, synthetic construct
  source 1..80: mol_type = other DNA
acccctggggccacataaatttcagaattcagtctttttatttggttttcagaatggtgatttgaggatatattacatgt

SEQ ID NO: 103413 - DNA, 80 bp, synthetic construct; identical to SEQ ID NO: 19860
  source 1..80: mol_type = other DNA

SEQ ID NO: 103414 - DNA, 80 bp, synthetic construct
  source 1..80: mol_type = other DNA
aattagctgggcatggggcacatgcctgtagtcccagctactcagggggctgaggtgggaggatcacttgagcccaggag

SEQ ID NO: 103415 - DNA, 80 bp, synthetic construct
  source 1..80: mol_type = other DNA
gggagatgtggtgggaacatccacagcctcccaattcctgcttatcttaaagtattgagaattgattatgcttcttgaaa

SEQ ID NO: 103416 - DNA, 80 bp, synthetic construct
  source 1..80: mol_type = other DNA
atagtaagatagcctgttcactctctctgtgtcaacacattttaaccacagtttaacattggagcctctcgtacaataga

SEQ ID NO: 103417 - DNA, 80 bp, synthetic construct; identical to SEQ ID NO: 19861
  source 1..80: mol_type = other DNA

SEQ ID NO: 103418 - DNA, 80 bp, synthetic construct
  source 1..80: mol_type = other DNA
tttccatagatgcgcttattcatttgattgaatcctgtatattgatagtgttttggtaactttgcagcctgggaagacgc

SEQ ID NO: 103419 - DNA, 80 bp, synthetic construct
  source 1..80: mol_type = other DNA
gacgtaaagaacagaagaaatcctcgccttgttccctacactcttctggatgaccgaaccaagaaatccaacaaggacag

SEQ ID NO: 103420 - DNA, 80 bp, synthetic construct
  source 1..80: mol_type = other DNA
tttaaagccaaataaatgaataaaagggggagtactggatagagtcctctagtctaggtgtggaatttcagccaagtgga

SEQ ID NO: 103421 - DNA, 80 bp, synthetic construct; identical to SEQ ID NO: 19862
  source 1..80: mol_type = other DNA

SEQ ID NO: 103422 - DNA, 80 bp, synthetic construct
  source 1..80: mol_type = other DNA
gatttttaaaggttctgcaaagaatacattttccttaaataatacctttgaagaatgtagtttaggccgggcatggtggc

SEQ ID NO: 103423 - DNA, 80 bp, synthetic construct
  source 1..80: mol_type = other DNA
gggaggctgaggcaggagaatggtgtgaacccgggaggcagagcttgcagtgagccgagatggcgccactgcactccagc

SEQ ID NO: 103424 - DNA, 80 bp, synthetic construct
  source 1..80: mol_type = other DNA
cagggcctataatttttgatggaaagttttaaaaatgtattccaaatgtattctagtggctcatattttcagtgcattac

SEQ ID NO: 103425 - DNA, 80 bp, synthetic construct
  source 1..80: mol_type = other DNA
ggacttctgtgtcttcccatttaaagtggcaggtgtaggatcctaatcataggcatcctgacatattttagtcctttgaa

SEQ ID NO: 103426 - DNA, 80 bp, synthetic construct; identical to SEQ ID NO: 19863
  source 1..80: mol_type = other DNA

SEQ ID NO: 103427 - DNA, 80 bp, synthetic construct
  source 1..80: mol_type = other DNA
cactgggaagaaagtaaacaataaaaggcttgtaagccaaaaaatggcaatcaaagagacttctgtaattctctgatata

SEQ ID NO: 103428 - DNA, 80 bp, synthetic construct
  source 1..80: mol_type = other DNA
gttgtagaaacaaaaggaaccactaccgaaaacacctccaatattttcttcattccagaaagtttgtgttcccaacaaag

SEQ ID NO: 103429 - DNA, 80 bp, synthetic construct
  source 1..80: mol_type = other DNA
atatcacaaaatctattgctcagtggcattccttaaataataatagtaataatttactgtttgtttatccattctcctat

SEQ ID NO: 103430 - DNA, 80 bp, synthetic construct; identical to SEQ ID NO: 19864
  source 1..80: mol_type = other DNA

SEQ ID NO: 103431 - DNA, 80 bp, synthetic construct
  source 1..80: mol_type = other DNA
cagagttttattattctagcttttacttgtaggtgtgtgatctaaagtgagttagcttttgtgtatgatgtaagcttaag

SEQ ID NO: 103432 - DNA, 80 bp, synthetic construct
  source 1..80: mol_type = other DNA
tttatgtctgtccttaagttaatattccattgtcttcatttttatcacatagtaaatttaaaatcaggtagggcaagtct

SEQ ID NO: 103433 - DNA, 80 bp, synthetic construct; identical to SEQ ID NO: 19865
  source 1..80: mol_type = other DNA

SEQ ID NO: 103434 - DNA, 80 bp, synthetic construct
  source 1..80: mol_type = other DNA
ctatttttttgtaaattcagtgggattgtctatatacataatcatgaggtctgcaaaaactaaacctcactttttctttt

SEQ ID NO: 103435 - DNA, 80 bp, synthetic construct
  source 1..80: mol_type = other DNA
cctttatcacattgaagagattcccttctgttcttagtttgtgggtgattttatcataaatagggtcatgaattttgtcc

SEQ ID NO: 103436 - DNA, 80 bp, synthetic construct
  source 1..80: mol_type = other DNA
ttcagtcatgatgcattgtccttttttacacagagctgtattctatttgttaatattttgcttaggacttttgtagctaa

SEQ ID NO: 103437 - DNA, 80 bp, synthetic construct
  source 1..80: mol_type = other DNA
aatttatcattgaaaccacgagcctagagttttatactataggaaaggtattttgttatgaattcaatgtatttgatagc

SEQ ID NO: 103438 - DNA, 80 bp, synthetic construct; identical to SEQ ID NO: 19866
  source 1..80: mol_type = other DNA

SEQ ID NO: 103439 - DNA, 80 bp, synthetic construct
  source 1..80: mol_type = other DNA
ggcattattgagtaggactatggcatcctatggagaacgttaatgttcaatcacagtatcaagagatcctggtttcacag

SEQ ID NO: 103440 - DNA, 80 bp, synthetic construct
  source 1..80: mol_type = other DNA
gtgtaataatcaaagagttcttgagcttccctctaactttataattctttaacatttgtgcatccctagaggatgtaggt

SEQ ID NO: 103441 - DNA, 80 bp, synthetic construct
  source 1..80: mol_type = other DNA
ttggtatctatagtcttaatagagatataattacctgttttccttccgctcccccactctgcttaatatcaaacattttg

SEQ ID NO: 103442 - DNA, 80 bp, synthetic construct; identical to SEQ ID NO: 19867
  source 1..80: mol_type = other DNA

SEQ ID NO: 103443 - DNA, 80 bp, synthetic construct
  source 1..80: mol_type = other DNA
acacatgatacatttgcttttagagataactttactccagaatggtgccagataagtaaaatgttaagaagttattctga

SEQ ID NO: 103444 - DNA, 80 bp, synthetic construct
  source 1..80: mol_type = other DNA
tatgctccacttcattttacttccatatttgcaattctcatttccattttttaaaatattattattattattattattat

SEQ ID NO: 103445 - DNA, 80 bp, synthetic construct
  source 1..80: mol_type = other DNA
ctaatttttttttttttttgtatttttagtagaggcggggtttcaccatattggccaggctggtcttgaactcctgatgt

SEQ ID NO: 103446 - DNA, 80 bp, synthetic construct; identical to SEQ ID NO: 19868
  source 1..80: mol_type = other DNA

SEQ ID NO: 103447 - DNA, 80 bp, synthetic construct
  source 1..80: mol_type = other DNA
tctcaaagtttctgtgggttatgaatgtgagtgataggtggttctggatcatagtctctctgagattgctattaagttgg

SEQ ID NO: 103448 - DNA, 80 bp, synthetic construct
  source 1..80: mol_type = other DNA
agatgctcgagtgccttcacatggaagctgacttcccccagaatgaaaaatcgaagagtgagtacaaggatgctgtaatg

SEQ ID NO: 103449 - DNA, 80 bp, synthetic construct
  source 1..80: mol_type = other DNA
agagaatagtatatgtaaaggcttagagacacaaggaggattgcaaatgggaatttcagagagctttgtacgaccagatg

SEQ ID NO: 103450 - DNA, 80 bp, synthetic construct; identical to SEQ ID NO: 19869
  source 1..80: mol_type = other DNA

SEQ ID NO: 103451 - DNA, 80 bp, synthetic construct
  source 1..80: mol_type = other DNA
acacaggaattggagcagatggacatggggtagtgggaagattctgagttttattgtaaacatcttcagtttgaggtgca

SEQ ID NO: 103452 - DNA, 80 bp, synthetic construct
  source 1..80: mol_type = other DNA
catttttacactaagggagagagagaggttgaaagtacagtaagaggagcttgatgagctgtggtctctgagaaggttga

SEQ ID NO: 103453 - DNA, 80 bp, synthetic construct
  source 1..80: mol_type = other DNA
tacagggaaaatcaggaggaagctgagggcagtctactgtataattattgtcttcaggttgaaatagaaaatgagtttat

SEQ ID NO: 103454 - DNA, 80 bp, synthetic construct; identical to SEQ ID NO: 19870
  source 1..80: mol_type = other DNA

SEQ ID NO: 103455 - DNA, 80 bp, synthetic construct
  source 1..80: mol_type = other DNA
agcttctggccattatttattcattctttcttctcttttctgtctctccttacagtctgtgatttccattatgtgtatgt

SEQ ID NO: 103456 - DNA, 80 bp, synthetic construct
  source 1..80: mol_type = other DNA
ggtactgtgcttatcaactccagaaatttttattcttttttataatttacctctttattgatattcactatttggtgaag

SEQ ID NO: 103457 - DNA, 80 bp, synthetic construct; identical to SEQ ID NO: 19871
  source 1..80: mol_type = other DNA

SEQ ID NO: 103458 - DNA, 80 bp, synthetic construct
  source 1..80: mol_type = other DNA
cagagttggaccaccaccatgcctggctaattttgtatttttagtagatatggggtttcactgtgttgatcaggctggtc

SEQ ID NO: 103459 - DNA, 80 bp, synthetic construct
  source 1..80: mol_type = other DNA
tgtctaataagcccaacatctcggcctcctgaggaataatttctattgactgctttttacccctttatgtatgggacata

SEQ ID NO: 103460 - DNA, 80 bp, synthetic construct
  source 1..80: mol_type = other DNA
gttgtttgctttcttggtaatttttctaaactagtttagtagagactgtgttgcctgtcatgtgtggccactgaagtctc

SEQ ID NO: 103461 - DNA, 80 bp, synthetic construct
  source 1..80: mol_type = other DNA
agccttctcttactgcatgtgcagagcctcaaggtctttcagaggtgtaagctttctcaggtttttcctgaatacatgca

SEQ ID NO: 103462 - DNA, 80 bp, synthetic construct; identical to SEQ ID NO: 19872
  source 1..80: mol_type = other DNA

SEQ ID NO: 103463 - DNA, 80 bp, synthetic construct
  source 1..80: mol_type = other DNA
atgctgtggaattagagagagggtgatgcagcaggagcaaattaaaacatcactagtttgctgttcttaccaacatttgg

SEQ ID NO: 103464 - DNA, 80 bp, synthetic construct
  source 1..80: mol_type = other DNA
actcagcaataaagattaaaaattgctgttttgtgggatggaacagagagcagactgcaaacagataaaaacattgtgga

SEQ ID NO: 103465 - DNA, 80 bp, synthetic construct
  source 1..80: mol_type = other DNA
aaattggacagtaattggggttaagagagcaagtaggggaaaagctaataagggcaagaaagtatggaaagttatatagg

SEQ ID NO: 103466 - DNA, 80 bp, synthetic construct; identical to SEQ ID NO: 19873
  source 1..80: mol_type = other DNA

SEQ ID NO: 103467 - DNA, 80 bp, synthetic construct
  source 1..80: mol_type = other DNA
gggaggaatcagtaaagggagaaatatcttcagagttagatgttgaaaggatcaggaatcagtaaagggagaaaatgtct

SEQ ID NO: 103468 - DNA, 80 bp, synthetic construct
  source 1..80: mol_type = other DNA
gtagatggtccacttaggataaaatatagggtacagatgggcagagagaacagacatagatgaaggtagaaagattaggg

SEQ ID NO: 103469 - DNA, 80 bp, synthetic construct; identical to SEQ ID NO: 19874
  source 1..80: mol_type = other DNA

SEQ ID NO: 103470 - DNA, 80 bp, synthetic construct
  source 1..80: mol_type = other DNA
tgtaattaatcagaattataatttattttctcttaggagaatgcttacatattccagataaaacatgaactctgtatttg

SEQ ID NO: 103471 - DNA, 80 bp, synthetic construct
  source 1..80: mol_type = other DNA
aaaagtattatcattagacctaaaagattctagatatgtataaaattttagcttttccttatagcttcttgtaacttaag

SEQ ID NO: 103472 - DNA, 80 bp, synthetic construct
  source 1..80: mol_type = other DNA
tgctcagtccttggccttaatcttgaggtagttcattaataatataattcctgaattgtttctgctttgaataccaacag

SEQ ID NO: 103473 - DNA, 80 bp, synthetic construct; identical to SEQ ID NO: 19875
  source 1..80: mol_type = other DNA

SEQ ID NO: 103474 - DNA, 80 bp, synthetic construct
  source 1..80: mol_type = other DNA
gcaggtatatatggagcacttactttgtggctcaggtgcttgatactacaaggtatgcaaaataagtttgttacggattg

SEQ ID NO: 103475 - DNA, 80 bp, synthetic construct
  source 1..80: mol_type = other DNA
gttgcttctttaaaacgtagttgcaaactaccctaaactaacttaataaatatatactatggggcagggcacagtggctc

SEQ ID NO: 103476 - DNA, 80 bp, synthetic construct
  source 1..80: mol_type = other DNA
aggaagccgaggcaggggaattgcttgaacccaggaggcggaagttgcaatgagctgagatggtgccatcgcactccagc

SEQ ID NO: 103477 - DNA, 80 bp, synthetic construct; identical to SEQ ID NO: 19876
  source 1..80: mol_type = other DNA

SEQ ID NO: 103478 - DNA, 80 bp, synthetic construct
  source 1..80: mol_type = other DNA
ttccaagagaattgtgtagggggcttttggggaaattattacatttttataccgaatttgccttctaaaatatttgattt

SEQ ID NO: 103479 - DNA, 80 bp, synthetic construct
  source 1..80: mol_type = other DNA
atagtatatactaattctatatttagaaaattaggagttacatctattaatgcatactagaatgtaatgtaatattttat

SEQ ID NO: 103480 - DNA, 80 bp, synthetic construct
  source 1..80: mol_type = other DNA
aatctgttttttgaggaaatactaactctgagtaaaaatttgactttcctgtttgtttagtattgcagcactgagaacga

SEQ ID NO: 103481 - DNA, 80 bp, synthetic construct
  source 1..80: mol_type = other DNA
caggccctgatgatttttgtattttttgtagagatgggatttcaccatgttggccagactggtctcgaattcctgacctc

SEQ ID NO: 103482 - DNA, 80 bp, synthetic construct; identical to SEQ ID NO: 19877
  source 1..80: mol_type = other DNA

SEQ ID NO: 103483 - DNA, 80 bp, synthetic construct
  source 1..80: mol_type = other DNA
gccatctcatgctacagccatggtgtctccactgctttacttcatctcattttaaattgttacatatgacctagctgtat

SEQ ID NO: 103484 - DNA, 80 bp, synthetic construct
  source 1..80: mol_type = other DNA
tctttctttctttttctttctttctttctttctttctttttctttctttctttctctttctttctttctttctttctttc

SEQ ID NO: 103485 - DNA, 80 bp, synthetic construct
  source 1..80: mol_type = other DNA
caacctcgaccttctaggctcaagtgatccttctgtatcagcctcttgagaagcttggacttacaggcatgcactaccat

SEQ ID NO: 103486 - DNA, 80 bp, synthetic construct; identical to SEQ ID NO: 19878
  source 1..80: mol_type = other DNA

SEQ ID NO: 103487 - DNA, 80 bp, synthetic construct
  source 1..80: mol_type = other DNA
gttggtcaagtctgaaatttcctcctctgcatctaactcagatgttagctgggtgaccaccttctttgagatatcaattc

SEQ ID NO: 103488 - DNA, 80 bp, synthetic construct
  source 1..80: mol_type = other DNA
tggtcctaatgttggatgctgacctttttatttttcccccagatcttttaaatacagcatttgtatgtatagcagatcac

SEQ ID NO: 103489 - DNA, 80 bp, synthetic construct; identical to SEQ ID NO: 19879
  source 1..80: mol_type = other DNA

SEQ ID NO: 103490 - DNA, 80 bp, synthetic construct
  source 1..80: mol_type = other DNA
tgatcctagatcagaaagcacttggtaaaatgggaaagaagataagaaggtatcattatcatcatcgctctaggttgaat

SEQ ID NO: 103491 - DNA, 80 bp, synthetic construct
  source 1..80: mol_type = other DNA
agaagacctatgcagtgaaggccggacggtggtattttgaatttgagacggtcactgctggagacatgagggttggttgg

SEQ ID NO: 103492 - DNA, 80 bp, synthetic construct
  source 1..80: mol_type = other DNA
tgtttcccacagcacaaacgtggaaaaatatttcacaggaaagcttttgtcctcgtagtctcaaaacccttccctacaac

SEQ ID NO: 103493 - DNA, 80 bp, synthetic construct; identical to SEQ ID NO: 19880
  source 1..80: mol_type = other DNA

SEQ ID NO: 103494 - DNA, 80 bp, synthetic construct
  source 1..80: mol_type = other DNA
atatgggcgaggtgcctgtaatcccagcactttgagaggctgagatggagggatcacttggggctaggagtgcaagacca

SEQ ID NO: 103495 - DNA, 80 bp, synthetic construct
  source 1..80: mol_type = other DNA
cacaccactgcactccagcctgggcaacagagtgagaccttgtctcaaaacaaacaaaaaaataataataacaacaaggt

SEQ ID NO: 103496 - DNA, 80 bp, synthetic construct
  source 1..80: mol_type = other DNA
agaataaataagcaatcatgaagagatttgacgtttggatatttcttggagtgaaatgtcctgtgtaggaaagcatttct

SEQ ID NO: 103497 - DNA, 80 bp, synthetic construct
  source 1..80: mol_type = other DNA
ataaaaggcagctttaggtttatacctcctgaagatcagatgtaatgaaccagagtgggaagtaacctgaggaagttaaa

SEQ ID NO: 103498 - DNA, 80 bp, synthetic construct; identical to SEQ ID NO: 19881
  source 1..80: mol_type = other DNA

SEQ ID NO: 103499 - DNA, 80 bp, synthetic construct
  source 1..80: mol_type = other DNA
tataaaaaggttggcatctatattcaatttttggcttgttacttcagcagatatcctaaggatatttttaggtttgattt

SEQ ID NO: 103500 - DNA, 80 bp, synthetic construct
  source 1..80: mol_type = other DNA
tcattttcaatgacagatgcccagcttgattccctagctcataattatttgtatttgtgggagtagagaaaaacaaaccg

SEQ ID NO: 103501 - DNA, 80 bp, synthetic construct; identical to SEQ ID NO: 19882
  source 1..80: mol_type = other DNA

SEQ ID NO: 103502 - DNA, 80 bp, synthetic construct
  source 1..80: mol_type = other DNA
tcttggcaagcaggcgatgtcgtggggtgtatggttgacatgaacgaacacaccatgatgttcacactgaatggtgaaat

SEQ ID NO: 103503 - DNA, 80 bp, synthetic construct
  source 1..80: mol_type = other DNA
tgagttgcagctgtaaatcgtgagggtgccttgtgactgacttgatcagatgcccttgaaataacattattagaaatgct

SEQ ID NO: 103504 - DNA, 80 bp, synthetic construct
  source 1..80: mol_type = other DNA
tcatctcataaaagtgaaatgaggacccacaatggatcaggtactttgctggatgctgaggtgacaaagatgaatgaaac

SEQ ID NO: 103505 - DNA, 80 bp, synthetic construct; identical to SEQ ID NO: 19883
  source 1..80: mol_type = other DNA

SEQ ID NO: 103506 - DNA, 80 bp, synthetic construct
  source 1..80: mol_type = other DNA
gaggtggatggatcacaaggtcaggagttcgagaccagcctgaccaacatagtgaaaccccatgtctactaaaaaataca

SEQ ID NO: 103507 - DNA, 80 bp, synthetic construct
  source 1..80: mol_type = other DNA
aaaaaaaaagatggaaggtgttggtgaagcaaggaagacatttactcttcagacatgcactcccaatttggtggccttgg

SEQ ID NO: 103508 - DNA, 80 bp, synthetic construct
  source 1..80: mol_type = other DNA
tgcctcctggattcaagtgattctcctgcctcagcttcccaagtagctgggattacaggtgcttaccaccatgcccagct

SEQ ID NO: 103509 - DNA, 80 bp, synthetic construct; identical to SEQ ID NO: 19884
  source 1..80: mol_type = other DNA

SEQ ID NO: 103510 - DNA, 80 bp, synthetic construct
  source 1..80: mol_type = other DNA
gatagctgagcccaggagtttgcgaccagcctgggcaacatagcaagactctgtttctacaaaaattaaaaaaattagcc

SEQ ID NO: 103511 - DNA, 80 bp, synthetic construct
  source 1..80: mol_type = other DNA
ccttatttcaaagataagccaacacttcttttcaaaatggcttttgaatatatcctgttatatgtttgcatatggatttg

SEQ ID NO: 103512 - DNA, 80 bp, synthetic construct
  source 1..80: mol_type = other DNA
cctgcctcagcctcccaagtagctgggattacaggggtgtgccaacacgcctcgctaatttttgtatttttagtagagac

SEQ ID NO: 103513 - DNA, 80 bp, synthetic construct; identical to SEQ ID NO: 19885
  source 1..80: mol_type = other DNA

SEQ ID NO: 103514 - DNA, 80 bp, synthetic construct
  source 1..80: mol_type = other DNA
aaaatggggtatccatcccctcaagcattaatcctttgtgttacaaacaatccaattatacttctagttattttaaaatg

SEQ ID NO: 103515 - DNA, 80 bp, synthetic construct
  source 1..80: mol_type = other DNA
tctctgatattggttttagggatgtcaaagtattagtgggaaggtaggaggaaggctttttattggtgttatctatctgt

SEQ ID NO: 103516 - DNA, 80 bp, synthetic construct
  source 1..80: mol_type = other DNA
agatttgcagaatgctcatccgtactatttaagcacgtaacaaatgttcatggtaccacacagtcacatagaccaatcac

SEQ ID NO: 103517 - DNA, 80 bp, synthetic construct; identical to SEQ ID NO: 19886
  source 1..80: mol_type = other DNA

SEQ ID NO: 103518 - DNA, 80 bp, synthetic construct
  source 1..80: mol_type = other DNA
ctcccaaattgactttatatagcttcccaaaaaagctccttaatttacctgtcactactgggagctagcattgaggtagc

SEQ ID NO: 103519 - DNA, 80 bp, synthetic construct
  source 1..80: mol_type = other DNA
cacctagcctgtctttatgtctgtatcatgttcgatttgccatttttaactatcttcataatctcttcttattgctacag

SEQ ID NO: 103520 - DNA, 80 bp, synthetic construct
  source 1..80: mol_type = other DNA
atgctgtagatccctgtctggtcagcttagtagacaacatggccaagtatattttgacctttctatctattgcatagttt

SEQ ID NO: 103521 - DNA, 80 bp, synthetic construct; identical to SEQ ID NO: 19887
  source 1..80: mol_type = other DNA

SEQ ID NO: 103522 - DNA, 80 bp, synthetic construct
  source 1..80: mol_type = other DNA
ggaggttgcagtgagctgagatcacgccacctcactccagcctggtgacagaggagtgagactccgtctgaaaaaaaatg

SEQ ID NO: 103523 - DNA, 80 bp, synthetic construct
  source 1..80: mol_type = other DNA
actcctcctcaaaaccacgcttacatggtcaagatcaagagcattgttgaactagagtgaaattccactagaatttcagg

SEQ ID NO: 103524 - DNA, 80 bp, synthetic construct; identical to SEQ ID NO: 19888
  source 1..80: mol_type = other DNA

SEQ ID NO: 103525 - DNA, 80 bp, synthetic construct
  source 1..80: mol_type = other DNA
tatgatgggatatcactcatgattaggtcactaaatcagtttactttgagttagtcaaatagagattatacaggtgggcc

SEQ ID NO: 103526 - DNA, 80 bp, synthetic construct
  source 1..80: mol_type = other DNA
cagccccaagttcatagctggcaaaaaaacaaacaaaaaccgagaaatctcagttctacagcccaaggaaccaaattcca

SEQ ID NO: 103527 - DNA, 80 bp, synthetic construct
  source 1..80: mol_type = other DNA
ctttaaatggctaagtttgtggtagtgtgttccatagcaatagaaaaccggtatgttgatcaaggggctttcttaggttc

SEQ ID NO: 103528 - DNA, 80 bp, synthetic construct; identical to SEQ ID NO: 19889
  source 1..80: mol_type = other DNA

SEQ ID NO: 103529 - DNA, 80 bp, synthetic construct
  source 1..80: mol_type = other DNA
ttgggaccaaggctttttatattaaagccatgatttttatatggagcatccctttatgtacacattcctcaagagcctag

SEQ ID NO: 103530 - DNA, 80 bp, synthetic construct
  source 1..80: mol_type = other DNA
attatgaagatggcaaaacatgccatatcaagcatgacacagacacagagacagggtagttatatgagaaatgtaattac

SEQ ID NO: 103531 - DNA, 80 bp, synthetic construct
  source 1..80: mol_type = other DNA
acaatataagtatttacagagaaaaccctaaagaatctatacacattactaggaacaattggagtgtttcacaaggtaga

SEQ ID NO: 103532 - DNA, 80 bp, synthetic construct
  source 1..80: mol_type = other DNA
gacttattaccaaataaatgagaggtgtgttatgttcatggagaagacaaaagcctgaagatattaattcttccaaaagt

SEQ ID NO: 103533 - DNA, 80 bp, synthetic construct; identical to SEQ ID NO: 19890
  source 1..80: mol_type = other DNA

SEQ ID NO: 103534 - DNA, 80 bp, synthetic construct
  source 1..80: mol_type = other DNA
tgagatggtcacttcttcacaccctatatgataacgaactccaaatggtcttaaatgtcaacagcaaaactttgaaacca

SEQ ID NO: 103535 - DNA, 80 bp, synthetic construct
  source 1..80: mol_type = other DNA
aaatcaagcaaaatgatgaaaaggtatgaacaggtatttcatagaagcaacaactcagagggacaataaacgtgtgaaga

SEQ ID NO: 103536 - DNA, 80 bp, synthetic construct
  source 1..80: mol_type = other DNA
gtctctccactttggaaaactgtgtgacaggatctctgaaaatggaatattcacatacccatgacccagaaattctactc

SEQ ID NO: 103537 - DNA, 80 bp, synthetic construct; identical to SEQ ID NO: 19891
  source 1..80: mol_type = other DNA

SEQ ID NO: 103538 - DNA, 80 bp, synthetic construct
  source 1..80: mol_type = other DNA
gtgtgtgtgtgtgtgtgtgtgtgtgtgtgtgtgcgtgtgtgtgtgtttgagagagagagagagaaagagagagatcgatc

SEQ ID NO: 103539 - DNA, 80 bp, synthetic construct
  source 1..80: mol_type = other DNA
atgatgagagtgtgtcacaaacaaaagtttatcagtaatccacggtccacttctgtgtattttgaaattcttcttttgag

SEQ ID NO: 103540 - DNA, 80 bp, synthetic construct
  source 1..80: mol_type = other DNA
aggcacatgccaccatgcctggctaatttttgtatttttaatagagacggggtttcaccatgttagccaggctggtggct

SEQ ID NO: 103541 - DNA, 80 bp, synthetic construct; identical to SEQ ID NO: 19892
  source 1..80: mol_type = other DNA

SEQ ID NO: 103542 - DNA, 80 bp, synthetic construct
  source 1..80: mol_type = other DNA
ttctttatcttctccaactccctagtgtttgattgcctcatatcctacatagtcctttggtgcttcccattgccgccttc

SEQ ID NO: 103543 - DNA, 80 bp, synthetic construct
  source 1..80: mol_type = other DNA
gtaattttggagatttgttaaggtctctcacccattctgcagttttgataaggtggtgggagtgggggcatgtacgctcc

SEQ ID NO: 103544 - DNA, 80 bp, synthetic construct; identical to SEQ ID NO: 19893
  source 1..80: mol_type = other DNA

SEQ ID NO: 103545 - DNA, 80 bp, synthetic construct
  source 1..80: mol_type = other DNA
aaatcagaacttgagtcccaaataccagctaataataaattgtactttttctttgccttgtgctctcttccttgccacgt

SEQ ID NO: 103546 - DNA, 80 bp, synthetic construct
  source 1..80: mol_type = other DNA
cctcctgagttcaagcgattctcctgtctcagcctccagagtagctgggattacaggcatgcgccaccatgcccggctaa

SEQ ID NO: 103547 - DNA, 80 bp, synthetic construct
  source 1..80: mol_type = other DNA
tgcactgggggaaaatttacttcttaaagcacactcatagggcaaatttccatgggtcaaaaaactattattaatttaat

SEQ ID NO: 103548 - DNA, 80 bp, synthetic construct
  source 1..80: mol_type = other DNA
ctaccaaagcttgttcttaactatcacatagtataaactccagattcccttacagaatatatcataccgaatatgtacat

SEQ ID NO: 103549 - DNA, 80 bp, synthetic construct; identical to SEQ ID NO: 19894
  source 1..80: mol_type = other DNA

SEQ ID NO: 103550 - DNA, 80 bp, synthetic construct
  source 1..80: mol_type = other DNA
tcctgcttcaacctcctgagtagctgggattacaggcacacaccacgacgcctggctaattttttgtattttttgtagag

SEQ ID NO: 103551 - DNA, 80 bp, synthetic construct
  source 1..80: mol_type = other DNA
taatgaaatgaatttcccataaagtagaattcaaattcttctaatgagggatgatttccgggttccttggggctccacac

SEQ ID NO: 103552 - DNA, 80 bp, synthetic construct
  source 1..80: mol_type = other DNA
gtaatagtgtggggccttaatccagtatggctggtgtcctcataagaagaggagaagacaccagggttgactgtgctcag

SEQ ID NO: 103553 - DNA, 80 bp, synthetic construct; identical to SEQ ID NO: 19895
  source 1..80: mol_type = other DNA

SEQ ID NO: 103554 - DNA, 80 bp, synthetic construct
  source 1..80: mol_type = other DNA
ggttatttatgtttggagattaccacattctacagtgtctgctgtggatacgtatcttgtgttgtccatttcaagcttct

SEQ ID NO: 103555 - DNA, 80 bp, synthetic construct
  source 1..80: mol_type = other DNA
ggtcctctcagaactcatggaattcctttcctcgggagaaaaccagattatttttgtaattaaaatagctgtatagctgt

SEQ ID NO: 103556 - DNA, 80 bp, synthetic construct
  source 1..80: mol_type = other DNA
tatgctttgtaccctcagttgaaatattgcagcagttagattatttgatggaaatgggtggcttattcagaagtctggtt

SEQ ID NO: 103557 - DNA, 80 bp, synthetic construct; identical to SEQ ID NO: 19896
  source 1..80: mol_type = other DNA

SEQ ID NO: 103558 - DNA, 80 bp, synthetic construct
  source 1..80: mol_type = other DNA
cttccctctcagagttctttattttttatttttattttatttttattttattttttgagacagagtgttgctcttgttgc

SEQ ID NO: 103559 - DNA, 80 bp, synthetic construct
  source 1..80: mol_type = other DNA
ttcaccacaatggccaggctggtctcaaactcctaacctcagatgatctgcccaccttggcctcccaaaatgttgggatt

SEQ ID NO: 103560 - DNA, 80 bp, synthetic construct; identical to SEQ ID NO: 19897
  source 1..80: mol_type = other DNA

SEQ ID NO: 103561 - DNA, 80 bp, synthetic construct
  source 1..80: mol_type = other DNA
gtgtaccacattttctttatccagttcactgttgatgggcactgaggttgattccatgtttttactattctgaatcgtgc

SEQ ID NO: 103562 - DNA, 80 bp, synthetic construct
  source 1..80: mol_type = other DNA
aacttatttacattcccaccaacagcgtataagcattctcttttctccacagcctcgtcagcatctgttcttttttgact

SEQ ID NO: 103563 - DNA, 80 bp, synthetic construct
  source 1..80: mol_type = other DNA
aaatgggggtgatttgttttttacttgttgggttatttaagtcccttatagattctggatattaggacctttgtcagaaa

SEQ ID NO: 103564 - DNA, 80 bp, synthetic construct
  source 1..80: mol_type = other DNA
taggcaaaagtacttatgtattatatggcacatagtaggccacaagcagctagctgttaccttttcttctgatcaaaaaa

SEQ ID NO: 103565 - DNA, 80 bp, synthetic construct; identical to SEQ ID NO: 19898
  source 1..80: mol_type = other DNA

SEQ ID NO: 103566 - DNA, 80 bp, synthetic construct
  source 1..80: mol_type = other DNA
taagttgtagctactgttttaacagatttgcaaatagttagggtgggtctggctcaggcccaagtaactgattgggctca

SEQ ID NO: 103567 - DNA, 80 bp, synthetic construct
  source 1..80: mol_type = other DNA
gaaggtgggacccatattttacatgtgctgggggagaggcatgattttgtggaaatctgttttattgtgttgaaatactt

SEQ ID NO: 103568 - DNA, 80 bp, synthetic construct
  source 1..80: mol_type = other DNA
tgtagacagtggtatacaatggtaactagttttttatttacctgttacctgtcttttgtattcaaagttgtgctccagaa

SEQ ID NO: 103569 - DNA, 80 bp, synthetic construct; identical to SEQ ID NO: 19899
  source 1..80: mol_type = other DNA

SEQ ID NO: 103570 - DNA, 80 bp, synthetic construct
  source 1..80: mol_type = other DNA
gctaactcctaagcagtgtgcccagagtcaacctaatttgttattttttttttttcttgtagaatcagggtctcgccatg

SEQ ID NO: 103571 - DNA, 80 bp, synthetic construct
  source 1..80: mol_type = other DNA
cttttgcactatagctcagagttgagtcgttgcaacagaggccatatgatccatgaaacctaaaatgtcttctctgtagt

SEQ ID NO: 103572 - DNA, 80 bp, synthetic construct; identical to SEQ ID NO: 19900
  source 1..80: mol_type = other DNA

SEQ ID NO: 103573 - DNA, 80 bp, synthetic construct
  source 1..80: mol_type = other DNA
ctctgtcttctttgatcccattgccacatagttgtccttgctgtgtataggctaatttttaaaagtaaatgtagtttcta

SEQ ID NO: 103574 - DNA, 80 bp, synthetic construct
  source 1..80: mol_type = other DNA
tctacctgtggaggtacttgcataaatacattcctttaaaggggaccaaaacagtaaagcaataaatagaaataccatct

SEQ ID NO: 103575 - DNA, 80 bp, synthetic construct
  source 1..80: mol_type = other DNA
aattacaaacattcccactacacagagaaaaaattgacttttaatacatctctcctacttaaagaactgagatgatagtg

SEQ ID NO: 103576 - DNA, 80 bp, synthetic construct
  source 1..80: mol_type = other DNA
atctgccctgcagaaaagtgcaaaaaaatgctttggtaacacctgtatattcttcaatcgtcaattatttttatttgcca

SEQ ID NO: 103577 - DNA, 80 bp, synthetic construct; identical to SEQ ID NO: 19901
  source 1..80: mol_type = other DNA

SEQ ID NO: 103578 - DNA, 80 bp, synthetic construct
  source 1..80: mol_type = other DNA
taatatctgtctgccatcttcttagatgttaactcttctacaaaaccttcctgactcccatctctccatacttcctttgc

SEQ ID NO: 103579 - DNA, 80 bp, synthetic construct
  source 1..80: mol_type = other DNA
attctcctgcctcagcctcccaagtaactgggactacaggtgcccaccaccatgcccggctaatttttatatttttagta

SEQ ID NO: 103580 - DNA, 80 bp, synthetic construct
  source 1..80: mol_type = other DNA
tctttacttttctttgtatgttattagaccacgagcacgttttgccctggatctgtgttagtcatcttttactcctactt

SEQ ID NO: 103581 - DNA, 80 bp, synthetic construct; identical to SEQ ID NO: 19902
  source 1..80: mol_type = other DNA

SEQ ID NO: 103582 - DNA, 80 bp, synthetic construct
  source 1..80: mol_type = other DNA
tgttaaattgggagccatagagaacaaaattaccaggaattccactattctgaagcttttaaataaaaaccctgctgctg

SEQ ID NO: 103583 - DNA, 80 bp, synthetic construct
  source 1..80: mol_type = other DNA
ttctagaattgtaaacatagctatggggaacagtttaggacataaatatttgtgcatattactagacactgaatatttta

SEQ ID NO: 103584 - DNA, 80 bp, synthetic construct
  source 1..80: mol_type = other DNA
tgaggaaatgtttctatcttggtagctcctagtttatgttaaatgggtgctagatttactaatttctgttaatgcagttc

SEQ ID NO: 103585 - DNA, 80 bp, synthetic construct; identical to SEQ ID NO: 19903
  source 1..80: mol_type = other DNA

SEQ ID NO: 103586 - DNA, 80 bp, synthetic construct
  source 1..80: mol_type = other DNA
cagagctaactacaattcttgtcaaaattgttggcttattcttaggatccattggttttatgctctacaaattagaggat

SEQ ID NO: 103587 - DNA, 80 bp, synthetic construct
  source 1..80: mol_type = other DNA
ggagtttgagaccagcctggccaacatggtgaaaccctatctctactaaaaatacaaaaattagccggacgcagtggcgt

SEQ ID NO: 103588 - DNA, 80 bp, synthetic construct; identical to SEQ ID NO: 19904
  source 1..80: mol_type = other DNA

SEQ ID NO: 103589 - DNA, 80 bp, synthetic construct
  source 1..80: mol_type = other DNA
cattcatgcataaatacatgcttcatacattaaacatgtatttttcccccatgcttagatccagtttattccagaaaaaa

SEQ ID NO: 103590 - DNA, 80 bp, synthetic construct
  source 1..80: mol_type = other DNA
agcaaggcaagtgaaccacatcccttggcacttagttccttcttactttccctatatgagagagtacatgcactcctgag

SEQ ID NO: 103591 - DNA, 80 bp, synthetic construct
  source 1..80: mol_type = other DNA
acccttatgggtaatatttaatgtcattgttccctttattacactacttttttcaccctagggtgacagctctcacaaag

SEQ ID NO: 103592 - DNA, 80 bp, synthetic construct; identical to SEQ ID NO: 19905
  source 1..80: mol_type = other DNA

SEQ ID NO: 103593 - DNA, 80 bp, synthetic construct
  source 1..80: mol_type = other DNA
atgatgaccttgatgtgttatatagtagtggaatctaagcaaagatggtactttctaccagctatcagtggatgggaaac

SEQ ID NO: 103594 - DNA, 80 bp, synthetic construct
  source 1..80: mol_type = other DNA
acaagtagcttgttagaatgatgaaaaatactttcctttttatgtgtgggcaatgtcaggctgaatctgaatatatagaa

SEQ ID NO: 103595 - DNA, 80 bp, synthetic construct
  source 1..80: mol_type = other DNA
atcaggaaattgacaatggtgattggaatgtgaactatcgcttcttcgtttgctaggtgaccagaatagacggcaccata

SEQ ID NO: 103596 - DNA, 80 bp, synthetic construct; identical to SEQ ID NO: 19906
  source 1..80: mol_type = other DNA

SEQ ID NO: 103597 - DNA, 80 bp, synthetic construct
  source 1..80: mol_type = other DNA
gaaacaaaggttactaatttatacgctgtgattttaaatttgtagttatgtgaggaaggttacagtccagagtaaagggt

SEQ ID NO: 103598 - DNA, 80 bp, synthetic construct
  source 1..80: mol_type = other DNA
ccttctcctcctcctctttgtgcaaaggatgctgtagggaaaaattaagcaacctgttagtcatctaatttgttagcgta

SEQ ID NO: 103599 - DNA, 80 bp, synthetic construct
  source 1..80: mol_type = other DNA
ctattgacactttaggccagacaattctttgttgaggacacaccttggacattgaaggatgctgagcagcatcctgacct

SEQ ID NO: 103600 - DNA, 80 bp, synthetic construct; identical to SEQ ID NO: 19907
  source 1..80: mol_type = other DNA

SEQ ID NO: 103601 - DNA, 80 bp, synthetic construct
  source 1..80: mol_type = other DNA
taacattatttttaaaatgtctgtttctgtttttggatatattttggggactgaaagtttgaaaaaagtttacgtattat

SEQ ID NO: 103602 - DNA, 80 bp, synthetic construct
  source 1..80: mol_type = other DNA
catcataatttgtgagaggtcaagctttgctcccttccattttaaattctcaaagctacttctcctaaaatgctacattg

SEQ ID NO: 103603 - DNA, 80 bp, synthetic construct
  source 1..80: mol_type = other DNA
agagttcaagaccagcctggccaacatggtgaaacgctgtctctattaaaaatataaacattagtggagtgtggaggtgg

SEQ ID NO: 103604 - DNA, 80 bp, synthetic construct; identical to SEQ ID NO: 19908
  source 1..80: mol_type = other DNA

SEQ ID NO: 103605 - DNA, 80 bp, synthetic construct
  source 1..80: mol_type = other DNA
tataaaaattaactgggtgtcgttgtgcacacctgtagtcccagctactcgggaggctgaggcaggagaatctcttgaac

SEQ ID NO: 103606 - DNA, 80 bp, synthetic construct
  source 1..80: mol_type = other DNA
aagcttgaagaatttgaagcttccctatgcttaatggattcgtggttttattacatacatacactgtatatgtgcacata

SEQ ID NO: 103607 - DNA, 80 bp, synthetic construct
  source 1..80: mol_type = other DNA
gtttgtagtgttagtcctttgtgcctacaatattttcattcacccaaacggttttaaaccaagaagtgaattcttaagtc

SEQ ID NO: 103608 - DNA, 80 bp, synthetic construct; identical to SEQ ID NO: 19909
  source 1..80: mol_type = other DNA

SEQ ID NO: 103609 - DNA, 80 bp, synthetic construct
  source 1..80: mol_type = other DNA
tattcatacaaaccagttaaggaatctaaatgtgttaaatgtgcaaacattgtacagtaagagcagtgcagccttttggg

SEQ ID NO: 103610 - DNA, 80 bp, synthetic construct
  source 1..80: mol_type = other DNA
ttgggttaccaatacttagcctttgttttagggttgagagatgggtgaatgtgcggcttttaaccaatgacttgatatag

SEQ ID NO: 103611 - DNA, 80 bp, synthetic construct
  source 1..80: mol_type = other DNA
gccattgactcgctgtgtggctttgggtaagtcagttacactttctgtgccatctttttttcatttgtaaaacaaaccaa

SEQ ID NO: 103612 - DNA, 80 bp, synthetic construct; identical to SEQ ID NO: 19910
  source 1..80: mol_type = other DNA

SEQ ID NO: 103613 - DNA, 80 bp, synthetic construct
  source 1..80: mol_type = other DNA
gaaagatgattttgttggaggaaatggaagatagggaagggtcattggattttatgtagatagtgtgaagaaatgcagcc

SEQ ID NO: 103614 - DNA, 80 bp, synthetic construct
  source 1..80: mol_type = other DNA
gagaatgctgataaggctcaaattacttaactttgttaccatctctagtaaaagctttagggaaggtgaaaatcaggtgg

SEQ ID NO: 103615 - DNA, 80 bp, synthetic construct
  source 1..80: mol_type = other DNA
aaggcttatgtagaatttgcctaaggactttgatagtgtctggaaataaatgcttctcatttcagaacaagtggtaaaac

SEQ ID NO: 103616 - DNA, 80 bp, synthetic construct; identical to SEQ ID NO: 19911
  source 1..80: mol_type = other DNA

SEQ ID NO: 103617 - DNA, 80 bp, synthetic construct
  source 1..80: mol_type = other DNA
tgtacaaagataaaaatgttcttttgaaattcagcatcaaacgcagcaactgctatatggtatgtgcgggtgagagcatg

SEQ ID NO: 103618 - DNA, 80 bp, synthetic construct
  source 1..80: mol_type = other DNA
ggtcagtgatgatatcagtcttctagggaggaagacttctttcccccattaaaggaaaacacagtttgtaagatcaaaaa

SEQ ID NO: 103619 - DNA, 80 bp, synthetic construct
  source 1..80: mol_type = other DNA
gtagcgagaccactgaggcacttgcagatgctgctgacataaattacagctgaagaatctgcacagatactacactaccg

SEQ ID NO: 103620 - DNA, 80 bp, synthetic construct; identical to SEQ ID NO: 19912
  source 1..80: mol_type = other DNA

SEQ ID NO: 103621 - DNA, 80 bp, synthetic construct
  source 1..80: mol_type = other DNA
gaaaccaattcatgatctgaatgagatattcaatgaagaaatacatatagtagaaaagaactaaacagaaatcttgtaac

SEQ ID NO: 103622 - DNA, 80 bp, synthetic construct
  source 1..80: mol_type = other DNA
atagaacttatgggatgccactgagcaatggagaaaggcacagaaaacgtttaacaaaataatgactaataactttccac

SEQ ID NO: 103623 - DNA, 80 bp, synthetic construct
  source 1..80: mol_type = other DNA
atcctaagagtaatgagagaatagcaccaagtcatatatacttggatttccatttgactatcagcaagtttctcagcaga

SEQ ID NO: 103624 - DNA, 80 bp, synthetic construct; identical to SEQ ID NO: 19913
  source 1..80: mol_type = other DNA

SEQ ID NO: 103625 - DNA, 80 bp, synthetic construct
  source 1..80: mol_type = other DNA
tacaatatagagagatgtaaattaaggcatcagaaatataaattgtgaggggagggtaaaagtccagagtattttttttt

SEQ ID NO: 103626 - DNA, 80 bp, synthetic construct
  source 1..80: mol_type = other DNA
tagagatggggtttcacgatgttggccaggatggtctcgatctcctgaccttgtgatccgctcacctcggcctcccaaag

SEQ ID NO: 103627 - DNA, 80 bp, synthetic construct
  source 1..80: mol_type = other DNA
aagggaaaggtatcaaagcttagcaccacaaaaaggtatcaaaccacaaaggtaagcaagagagcaagaaagaaatgaag

SEQ ID NO: 103628 - DNA, 80 bp, synthetic construct; identical to SEQ ID NO: 19914
  source 1..80: mol_type = other DNA

SEQ ID NO: 103629 - DNA, 80 bp, synthetic construct
  source 1..80: mol_type = other DNA
cactggagcatccaaatatatgaagtatgttttatctaaagggagagataggcttcaatgcaacaatagtagggaagttc

SEQ ID NO: 103630 - DNA, 80 bp, synthetic construct
  source 1..80: mol_type = other DNA
cagatgtatagctgaagaatacacattattctcaactgctcatgtggcattctccaggacagatcatatgttaggccaca

SEQ ID NO: 103631 - DNA, 80 bp, synthetic construct
  source 1..80: mol_type = other DNA
aaaagaaattaaaaattttcttgagacaaacaaaaatggcgacacaacataccaaaagctatgggatacagcagaggcag

SEQ ID NO: 103632 - DNA, 80 bp, synthetic construct
  source 1..80: mol_type = other DNA
gactaaacaatacaaaagatcaatgatacgaagagttggttttttgaaaagacaaaatcagtaaacctttagctagacaa

SEQ ID NO: 103633 - DNA, 80 bp, synthetic construct; identical to SEQ ID NO: 19915
  source 1..80: mol_type = other DNA

SEQ ID NO: 103634 - DNA, 80 bp, synthetic construct
  source 1..80: mol_type = other DNA
tgcccactttcaccacttctgttcaacataatactagaagtgctagccagagaatttggcaagaaaaagaaataaaaggc

SEQ ID NO: 103635 - DNA, 80 bp, synthetic construct
  source 1..80: mol_type = other DNA
gcactagtagtgaatgctctgagaaaaaaaatcaagatacaatctcagttacaatagctttaaaaatcagttatcggctg

SEQ ID NO: 103636 - DNA, 80 bp, synthetic construct
  source 1..80: mol_type = other DNA
tacaaaaaaattagccgggcatggtggcaggcacctgtaatcccacctactggggaggctgaggcaggagaatcacttga

SEQ ID NO: 103637 - DNA, 80 bp, synthetic construct; identical to SEQ ID NO: 19916
  source 1..80: mol_type = other DNA

SEQ ID NO: 103638 - DNA, 80 bp, synthetic construct
  source 1..80: mol_type = other DNA
taaagctggaaacatcacactaactgagtttaaaatacacaaagccatagtaaccaaaacactacctgacttgaaactat

SEQ ID NO: 103639 - DNA, 80 bp, synthetic construct
  source 1..80: mol_type = other DNA
ttggggaaaggacagtttcttcaataaatggtacagggaaaattgaatatccacatgcagaagaatgaaattggacccct

SEQ ID NO: 103640 - DNA, 80 bp, synthetic construct
  source 1..80: mol_type = other DNA
gcaaaaatagacaagtgggattatatcaaactaaaaatcctctgcacagccaaggaaacaattaacagagtgaaaagaca

SEQ ID NO: 103641 - DNA, 80 bp, synthetic construct; identical to SEQ ID NO: 19917
  source 1..80: mol_type = other DNA

SEQ ID NO: 103642 - DNA, 80 bp, synthetic construct
  source 1..80: mol_type = other DNA
atgatccagaattcctgggtatatatcccaaggaaaggaaatcagtgtgtggaaggaatatctgcacttctataattatc

SEQ ID NO: 103643 - DNA, 80 bp, synthetic construct
  source 1..80: mol_type = other DNA
tattgtgtttagtgaaataagccagacatagaaagaaaaatactgcattgcccactcatatgtagaatcgaaaaaagtta

SEQ ID NO: 103644 - DNA, 80 bp, synthetic construct
  source 1..80: mol_type = other DNA
catcaggtattgtatatctcaaaatagctagaagagaggattttgtatgttctcaccacaaagaaatgaaaaatgttcaa

SEQ ID NO: 103645 - DNA, 80 bp, synthetic construct; identical to SEQ ID NO: 19918
  source 1..80: mol_type = other DNA

SEQ ID NO: 103646 - DNA, 80 bp, synthetic construct
  source 1..80: mol_type = other DNA
ggtggaaccgagtacaaaattatttcctgcggtttttgcacaagctacaagtcccaatgttttccagtttgagttgggaa

SEQ ID NO: 103647 - DNA, 80 bp, synthetic construct
  source 1..80: mol_type = other DNA
ttctttcaagaaaagatagccatgcttgaaaatctctttcaggtcacaagggtaacaaaataattaaaaagtgtttctct

SEQ ID NO: 103648 - DNA, 80 bp, synthetic construct; identical to SEQ ID NO: 19919
  source 1..80: mol_type = other DNA

SEQ ID NO: 103649 - DNA, 80 bp, synthetic construct
  source 1..80: mol_type = other DNA
taaccgtaacaaaggatgccttccagaatgtggctggagattaagatggataaaaggtagaacaagtccaagttgaaaag

SEQ ID NO: 103650 - DNA, 80 bp, synthetic construct
  source 1..80: mol_type = other DNA
tgtggaggtgggcaagaatgagaataatcagtagcaatgaggtgtcaataatttgatactgtctacatggaagacagtga

SEQ ID NO: 103651 - DNA, 80 bp, synthetic construct
  source 1..80: mol_type = other DNA
gggagtaactatgactctcttaaggtagccaaatgcctagtcatctaattagtgacgttcatgaatggatgaacgagatt

SEQ ID NO: 103652 - DNA, 80 bp, synthetic construct; identical to SEQ ID NO: 19920
  source 1..80: mol_type = other DNA

SEQ ID NO: 103653 - DNA, 80 bp, synthetic construct
  source 1..80: mol_type = other DNA
ccttaaatgtaaatgggctaaatgctccaattaaaaaacacagactggcaaattggataaagagtcaagacccatcagtg

SEQ ID NO: 103654 - DNA, 80 bp, synthetic construct
  source 1..80: mol_type = other DNA
aaggccattacataatggtaaagggatcaattcaacaagaaaagctaactatcctaaatatatatgcacccaatacagga

SEQ ID NO: 103655 - DNA, 80 bp, synthetic construct
  source 1..80: mol_type = other DNA
aagcggacctaatagacatctacagaactctccaccccaaatcaacagaatatacattcttctcatcaccacatcgcact

SEQ ID NO: 103656 - DNA, 80 bp, synthetic construct
  source 1..80: mol_type = other DNA
acctgctcctgaatgactatggggtacataacaaaatgaaggcagaaataaagatgttctttgaaaccaacgagaacaaa

SEQ ID NO: 103657 - DNA, 80 bp, synthetic construct; identical to SEQ ID NO: 19921
  source 1..80: mol_type = other DNA

SEQ ID NO: 103658 - DNA, 80 bp, synthetic construct
  source 1..80: mol_type = other DNA
ctataaacacctctatgcaaataaactagaaaatctagaagaaatggataaattcctcgacacatacaccctcccaagac

SEQ ID NO: 103659 - DNA, 80 bp, synthetic construct
  source 1..80: mol_type = other DNA
actattccaatcaatagaaaaagagggaatcctccctaactcattttatgaggccagcatcatcctgataccaaagcctg

SEQ ID NO: 103660 - DNA, 80 bp, synthetic construct
  source 1..80: mol_type = other DNA
atgataaagtgggcttcatccctgggatgcaaggctggttcaacatacacaaattaataaacgtaatccagcatataaac

SEQ ID NO: 103661 - DNA, 80 bp, synthetic construct; identical to SEQ ID NO: 19922
  source 1..80: mol_type = other DNA

SEQ ID NO: 103662 - DNA, 80 bp, synthetic construct
  source 1..80: mol_type = other DNA
gcaacttcagcaaagtctcaggatacaaaatcaatgtgcaaaaatcacaagcattcttatacaccaacaacagacaaaca

SEQ ID NO: 103663 - DNA, 80 bp, synthetic construct
  source 1..80: mol_type = other DNA
catgctcatgggtaggaagaatcaatatcatgaaaatggccatactgcccaaggtaatttatagattcaatgccatcccc

SEQ ID NO: 103664 - DNA, 80 bp, synthetic construct
  source 1..80: mol_type = other DNA
taaccaaaacagcatggtactggtaccaaaacagagatacagaccaatggaacagaacagagccctcagaaacaacacca

SEQ ID NO: 103665 - DNA, 80 bp, synthetic construct
  source 1..80: mol_type = other DNA
ggattaaagacttaaatgttcgacctaaaaccataaaaaccctagaagaaaacctaggcaataccattcaggacataggc

SEQ ID NO: 103666 - DNA, 80 bp, synthetic construct; identical to SEQ ID NO: 19923
  source 1..80: mol_type = other DNA

SEQ ID NO: 103667 - DNA, 80 bp, synthetic construct
  source 1..80: mol_type = other DNA
ccacaatgagataccatctcacaccagttagaatggtgatcattaaaaagacaggaaacaacaggtgctggagaagatgt

SEQ ID NO: 103668 - DNA, 80 bp, synthetic construct
  source 1..80: mol_type = other DNA
gttataaagacacatgcacacgtatgtttattgtggcattatttacaatatcaaagacttggaaccaacccaaatgtcca

SEQ ID NO: 103669 - DNA, 80 bp, synthetic construct
  source 1..80: mol_type = other DNA
tgttcttactcacaggtgggaattgaacaatgaaaacacttggacacaggaagaggaacatcacacaccggggcctgttg

SEQ ID NO: 103670 - DNA, 80 bp, synthetic construct; identical to SEQ ID NO: 19924
  source 1..80: mol_type = other DNA

SEQ ID NO: 103671 - DNA, 80 bp, synthetic construct
  source 1..80: mol_type = other DNA
gcacacattggagtgaatagagtagatagttttattaggctggcttggtgaccttggacatctttcttaaattatttgag

SEQ ID NO: 103672 - DNA, 80 bp, synthetic construct
  source 1..80: mol_type = other DNA
atgtatacaccattgtgctaaaaagagctatgctggagattaaaattttcatcatcaagaaatcagttgtaattcatctt

SEQ ID NO: 103673 - DNA, 80 bp, synthetic construct; identical to SEQ ID NO: 19925
  source 1..80: mol_type = other DNA

SEQ ID NO: 103674 - DNA, 80 bp, synthetic construct
  source 1..80: mol_type = other DNA
aggaaggaggaatcacttgagcccagaagtttgaaaccagcttgggcaacatagtgagaccccatctctacaaaaaataa

SEQ ID NO: 103675 - DNA, 80 bp, synthetic construct
  source 1..80: mol_type = other DNA
attattatattaaaaaatgatgagaggagccatgtgacagtgaattcaagattggaaatgagagaaaggaggcagcaagt

SEQ ID NO: 103676 - DNA, 80 bp, synthetic construct; identical to SEQ ID NO: 19926
  source 1..80: mol_type = other DNA

SEQ ID NO: 103677 - DNA, 80 bp, synthetic construct
  source 1..80: mol_type = other DNA
ctctctttttctctttctctctccttccctccctcccttccttcctgccctcctatcttccttgtccccatcccttttct

SEQ ID NO: 103678 - DNA, 80 bp, synthetic construct
  source 1..80: mol_type = other DNA
cagtgacacgatctcagctcactgcaacctccgcctcccaggttcaagcaattctcccacctcagcctcctgagtatttg

SEQ ID NO: 103679 - DNA, 80 bp, synthetic construct
  source 1..80: mol_type = other DNA
ccagtctttctttaaatgttgctttctcaatgatgcccattctgacaaccccatttaaaattgctgcccttgattctggt

SEQ ID NO: 103680 - DNA, 80 bp, synthetic construct; identical to SEQ ID NO: 19927
  source 1..80: mol_type = other DNA

SEQ ID NO: 103681 - DNA, 80 bp, synthetic construct
  source 1..80: mol_type = other DNA
gacctctctttctttgacaccagacagaaagaattaaggatggctgaagatgatactggaggtggaggagaaataagtag

SEQ ID NO: 103682 - DNA, 80 bp, synthetic construct
  source 1..80: mol_type = other DNA
gtcattcaggaagtttggcactgaaagtccctaaagacttgccagctttcccggaggtcccagcctggtaaagaaatata

SEQ ID NO: 103683 - DNA, 80 bp, synthetic construct
  source 1..80: mol_type = other DNA
tttcttgtgttgactttgcttgactcatagggttatcttactttccctgtctctgtcctgtgcagaattctagtcattac

SEQ ID NO: 103684 - DNA, 80 bp, synthetic construct
  source 1..80: mol_type = other DNA
tggagcagaatgcccaaccagtttttgaaggtagatgtgtctcgaataagtgaacgccaaggctggttggtgcagtgttt

SEQ ID NO: 103685 - DNA, 80 bp, synthetic construct; identical to SEQ ID NO: 19928
  source 1..80: mol_type = other DNA

SEQ ID NO: 103686 - DNA, 80 bp, synthetic construct
  source 1..80: mol_type = other DNA
tggtttcttcattcactcttgcgttacttacaatgacaatggcgaataaaaattcagacaagtgcaactgcaatccgact

SEQ ID NO: 103687 - DNA, 80 bp, synthetic construct
  source 1..80: mol_type = other DNA
gatattaatgaaagaaaattgggaaaatactgggagtgtcttcgaaacaagtttatatgcattctaggcagtaataatag

SEQ ID NO: 103688 - DNA, 80 bp, synthetic construct
  source 1..80: mol_type = other DNA
aaggagctaagtttctaagttttgggccaagatttccctcccaaaatgccactgaaatgttgaatcacaaactgagtaaa

SEQ ID NO: 103689 - DNA, 80 bp, synthetic construct; identical to SEQ ID NO: 19929
  source 1..80: mol_type = other DNA

SEQ ID NO: 103690 - DNA, 80 bp, synthetic construct
  source 1..80: mol_type = other DNA
ccatataatattatttggcaataaaaatgattgaagtactgatatatgctacaaaatgcaagaactttgaagacattata

SEQ ID NO: 103691 - DNA, 80 bp, synthetic construct
  source 1..80: mol_type = other DNA
gttacctagggctaggagcggaacaggactgctaatgggtactaaattccttttgggatgataaaagtgttctaaactca

SEQ ID NO: 103692 - DNA, 80 bp, synthetic construct
  source 1..80: mol_type = other DNA
aaaatcaaagaaaaattaatctggctagttaattctttttatgtattacatatgtatttacattttttacatgaggtaat

SEQ ID NO: 103693 - DNA, 80 bp, synthetic construct; identical to SEQ ID NO: 19930
  source 1..80: mol_type = other DNA

SEQ ID NO: 103694 - DNA, 80 bp, synthetic construct
  source 1..80: mol_type = other DNA
attgcctgtgatagatgtgtatgtatgtgaatggataatgtaaactctcactaaagatcataaaggatttgaggcagttt

SEQ ID NO: 103695 - DNA, 80 bp, synthetic construct
  source 1..80: mol_type = other DNA
agcagccaaagaaaaatatgatgagtttcaaaatccaaattccaaaaaaggaagtcttaactagcatggttgagaagaat

SEQ ID NO: 103696 - DNA, 80 bp, synthetic construct
  source 1..80: mol_type = other DNA
tataagctccctgggggcaggaatcatgtctatattattcaccattgtatcatcagtgcgcagtgctaatacataatagg

SEQ ID NO: 103697 - DNA, 80 bp, synthetic construct; identical to SEQ ID NO: 19931
  source 1..80: mol_type = other DNA

SEQ ID NO: 103698 - DNA, 80 bp, synthetic construct
  source 1..80: mol_type = other DNA
tatttcacatttcagactttcagattcaggatgctcaaccggtaagtataatgcaaacatttcaaagtctgaataaagtc

SEQ ID NO: 103699 - DNA, 80 bp, synthetic construct
  source 1..80: mol_type = other DNA
tcctcccttctacagatctgttgacatcttagagttgacagagcaggaggaattgctgaaatttcactatcacactctcc

SEQ ID NO: 103700 - DNA, 80 bp, synthetic construct
  source 1..80: mol_type = other DNA
ctctatgccattgagaacaagtacatgcctggtttgctgcgtgctggctactatgacctgctgattgacatccacctgag

SEQ ID NO: 103701 - DNA, 80 bp, synthetic construct; identical to SEQ ID NO: 19932
  source 1..80: mol_type = other DNA

SEQ ID NO: 103702 - DNA, 80 bp, synthetic construct
  source 1..80: mol_type = other DNA
tacctctcatcaagcttttctataccctgctgatcatgggcatctttcacaacgaggacttgaagcacatcttgcagttg

SEQ ID NO: 103703 - DNA, 80 bp, synthetic construct
  source 1..80: mol_type = other DNA
cagagccagttaaattgcaggtaatcagaacaagagacttgagtgaatttcagaattgctaagcattaaggtattagaac

SEQ ID NO: 103704 - DNA, 80 bp, synthetic construct
  source 1..80: mol_type = other DNA
cctgaaatacaagccatcaaatacccctttccacccatatttccactcttaccaaccttagaatacttgtttaccagtag

SEQ ID NO: 103705 - DNA, 80 bp, synthetic construct; identical to SEQ ID NO: 19933
  source 1..80: mol_type = other DNA

SEQ ID NO: 103706 - DNA, 80 bp, synthetic construct
  source 1..80: mol_type = other DNA
ttttaaggaatcagacacactggctgtctttatgctcctcaagatgtctaaagggtcctttattaatgtctcctctgttt

SEQ ID NO: 103707 - DNA, 80 bp, synthetic construct
  source 1..80: mol_type = other DNA
ctctgggtatgcacttaggggaaacacaagtgaaccctgcctttcagaatctcacagcctctaaggaaatatacactcat

SEQ ID NO: 103708 - DNA, 80 bp, synthetic construct
  source 1..80: mol_type = other DNA
tgtgctcagcagttacaagaaaaaggaacaaggcagggtgttctaggagctttccatgcaaaacaaatagcccagcaaag

SEQ ID NO: 103709 - DNA, 80 bp, synthetic construct; identical to SEQ ID NO: 19934
  source 1..80: mol_type = other DNA

SEQ ID NO: 103710 - DNA, 80 bp, synthetic construct
  source 1..80: mol_type = other DNA
aatcactgaatgaatgagcattcaccacttaattgtcttaagtttagatttctagaattggtacagcagttcaatgatct

SEQ ID NO: 103711 - DNA, 80 bp, synthetic construct
  source 1..80: mol_type = other DNA
aactttcccagaagacccttagcaaactttcccttatatatttcattggccattgcacctgtggctgaaagggaggctgg

SEQ ID NO: 103712 - DNA, 80 bp, synthetic construct
  source 1..80: mol_type = other DNA
catggtggcaggcaagagggcatgtgcaggggaacttccatttataaaaccatcagatcttgtgagacttattcactacc

SEQ ID NO: 103713 - DNA, 80 bp, synthetic construct
  source 1..80: mol_type = other DNA
ttgcttatacaaattatgtttcatctcctgggaccgagcacattgctgcctatacaaaatcaggattctgtttctaagag

SEQ ID NO: 103714 - DNA, 80 bp, synthetic construct; identical to SEQ ID NO: 19935
  source 1..80: mol_type = other DNA

SEQ ID NO: 103715 - DNA, 80 bp, synthetic construct
  source 1..80: mol_type = other DNA
ctctgccttgcaaaattatataactcacacgtcttgttttccttgttctgtttaaagtcttcaagttgatttagttagta

SEQ ID NO: 103716 - DNA, 80 bp, synthetic construct
  source 1..80: mol_type = other DNA
catcttccactcataggaatttttgattcctaggactcgatgctagaggctttccatttgtgcctaccatagaagaaaca

SEQ ID NO: 103717 - DNA, 80 bp, synthetic construct
  source 1..80: mol_type = other DNA
aatctacctcagagtgggcctcagagtgtgggaagttactggcgtagggatggtgttaaacaatgtaattcacagatgtc

SEQ ID NO: 103718 - DNA, 80 bp, synthetic construct; identical to SEQ ID NO: 19936
  source 1..80: mol_type = other DNA

SEQ ID NO: 103719 - DNA, 80 bp, synthetic construct
  source 1..80: mol_type = other DNA
aactaaaaccctggacattacaaagaagacaacataagaaggctctgaaagatagagagaagaagagaggttggctacag

SEQ ID NO: 103720 - DNA, 80 bp, synthetic construct
  source 1..80: mol_type = other DNA
cagggaaggggcagcttagcaagacagaaatgtgttagataataactgcactactgaagccaaaaaccacagaaaaaact

SEQ ID NO: 103721 - DNA, 80 bp, synthetic construct; identical to SEQ ID NO: 19937
  source 1..80: mol_type = other DNA

SEQ ID NO: 103722 - DNA, 80 bp, synthetic construct
  source 1..80: mol_type = other DNA
tggggtcagaggaaaccaggtgaaacagagttaaaaataagacccagagctcctagcataatcctcaaaatgttgagatt

SEQ ID NO: 103723 - DNA, 80 bp, synthetic construct
  source 1..80: mol_type = other DNA
cgccctgtaattccttcaaaatggaaaagaaatagaaagcctcaacggcagagaaacaaaatatatggcaaagaaccaaa

SEQ ID NO: 103724 - DNA, 80 bp, synthetic construct
  source 1..80: mol_type = other DNA
agatctaacatttgtgatgttggagtctcagaggataggagaaagagggtgaactgaagaaaataatgctgaaaactttt

SEQ ID NO: 103725 - DNA, 80 bp, synthetic construct; identical to SEQ ID NO: 19938
  source 1..80: mol_type = other DNA

SEQ ID NO: 103726 - DNA, 80 bp, synthetic construct
  source 1..80: mol_type = other DNA
aacactgggtaatgttgtaatatggtgaatgcagtgcatttttattctctggagttttctaatttatgattgatggttga

SEQ ID NO: 103727 - DNA, 80 bp, synthetic construct
  source 1..80: mol_type = other DNA
gaagtctactggtgttgacattgtaccatctggtgcaccgtcaataccagtagactgtatgttaggtatgtatataaaat

SEQ ID NO: 103728 - DNA, 80 bp, synthetic construct
  source 1..80: mol_type = other DNA
atcagaacaaacggaaccacaggtgaaatgacagactgaagtcatagcatatcaataatctaaatataccaattacaaga

SEQ ID NO: 103729 - DNA, 80 bp, synthetic construct
  source 1..80: mol_type = other DNA
aagttgacttcagagcacagaaaattaccaaggagataaggatcatacataatggtcagtccaccaagaagataaatata

SEQ ID NO: 103730 - DNA, 80 bp, synthetic construct; identical to SEQ ID NO: 19939
  source 1..80: mol_type = other DNA

SEQ ID NO: 103731 - DNA, 80 bp, synthetic construct
  source 1..80: mol_type = other DNA
acaacacacttctaaataatctatggtttgaggaagtatggggagaaatttaaagattcattaaactaaaagaaattgga

SEQ ID NO: 103732 - DNA, 80 bp, synthetic construct
  source 1..80: mol_type = other DNA
aagcggaaaccactcagatcaataacctgacctgccacttcaagaattttgaaaacaaagagtaaaataaacctaaagca

SEQ ID NO: 103733 - DNA, 80 bp, synthetic construct; identical to SEQ ID NO: 19940
  source 1..80: mol_type = other DNA

SEQ ID NO: 103734 - DNA, 80 bp, synthetic construct
  source 1..80: mol_type = other DNA
tgcatacatactatatgattccatttatgtaacattcttgcaatgacaaaaccatagagatggaaaacaaatttgtggtt

SEQ ID NO: 103735 - DNA, 80 bp, synthetic construct
  source 1..80: mol_type = other DNA
ctggttatgagattgtactacagttttgcaaagtgttaccaatcgggaaactgcataaagcgtacttgaagtctctctgt

SEQ ID NO: 103736 - DNA, 80 bp, synthetic construct
  source 1..80: mol_type = other DNA
gttcaaacataaatggtaaagtttcccgcagtttaactgaaccattaatgttagcagcgcgtagttatcccttataaaga

SEQ ID NO: 103737 - DNA, 80 bp, synthetic construct; identical to SEQ ID NO: 19941
  source 1..80: mol_type = other DNA

SEQ ID NO: 103738 - DNA, 80 bp, synthetic construct
  source 1..80: mol_type = other DNA
tatatgcaatttctgtgccatttcatatagaagacttgattgtctgtggcttttcatctctatggagggtcctggaacca

SEQ ID NO: 103739 - DNA, 80 bp, synthetic construct
  source 1..80: mol_type = other DNA
aaaaagagttcttgtaaatattcaatgaatgttcaatagagatgttagctagaaaataatggaaatttaggataagcatg

SEQ ID NO: 103740 - DNA, 80 bp, synthetic construct; identical to SEQ ID NO: 19942
  source 1..80: mol_type = other DNA

SEQ ID NO: 103741 - DNA, 80 bp, synthetic construct
  source 1..80: mol_type = other DNA
ctgcctcagcctcctgagtagctgggactacaggcatgcaccaccacacccaactaatttttgtatctttagtagagatg

SEQ ID NO: 103742 - DNA, 80 bp, synthetic construct
  source 1..80: mol_type = other DNA
tcttgtttttcaaactttcagatcaatatgcttctcaattttaaggatgacaaaagtgaatgtccatgtccagaagaaat

SEQ ID NO: 103743 - DNA, 80 bp, synthetic construct
  source 1..80: mol_type = other DNA
agaaagttatataaaaacatttattattatggcaaaatggcaaaataactgtccctatgtggggagtcctgagggataga

SEQ ID NO: 103744 - DNA, 80 bp, synthetic construct
  source 1..80: mol_type = other DNA
aggttaaggttggtttagtcaatgggtacaaagtttcggttatacaagatgaatgaattctggagatccatggcacaaca

SEQ ID NO: 103745 - DNA, 80 bp, synthetic construct; identical to SEQ ID NO: 19943
  source 1..80: mol_type = other DNA

SEQ ID NO: 103746 - DNA, 80 bp, synthetic construct
  source 1..80: mol_type = other DNA
aatccaaatctgttaagggaagtctcccctccttttattctaagaactttaaaaatggaattgattaggtattctggacg

SEQ ID NO: 103747 - DNA, 80 bp, synthetic construct
  source 1..80: mol_type = other DNA
catattaatttggtttatgaatgaagtaccactaaatgactcccagaaaattatactacatgtgtgtgtacatgtatgtg

SEQ ID NO: 103748 - DNA, 80 bp, synthetic construct
  source 1..80: mol_type = other DNA
ctttaaaactttagaattactgcttcagatataaagcattccctggtttagggtacctaattatgcctgttctctctgtt

SEQ ID NO: 103749 - DNA, 80 bp, synthetic construct; identical to SEQ ID NO: 19944
  source 1..80: mol_type = other DNA

SEQ ID NO: 103750 - DNA, 80 bp, synthetic construct
  source 1..80: mol_type = other DNA
tagatgtttttgacattgttctaagttgtgcatgaaagaaattacaaggcctcagaattatttgcccaagtgtattcttt

SEQ ID NO: 103751 - DNA, 80 bp, synthetic construct
  source 1..80: mol_type = other DNA
gtgacatatctgaagaagaagcaagcagaaaaaccagttgagagtgactccaaaaagtcctgtaagcagtatgagagtgc

SEQ ID NO: 103752 - DNA, 80 bp, synthetic construct
  source 1..80: mol_type = other DNA
atagcaacagactgagaggtagcagcatgataaagatggatggtctccatagagaactagaaatttaggtattttatcag

SEQ ID NO: 103753 - DNA, 80 bp, synthetic construct; identical to SEQ ID NO: 19945
  source 1..80: mol_type = other DNA

SEQ ID NO: 103754 - DNA, 80 bp, synthetic construct
  source 1..80: mol_type = other DNA
acttttacagcacttttttttgacttacaacagaaaacctttattcatacagttacttctaaatttatttttcagtgtca

SEQ ID NO: 103755 - DNA, 80 bp, synthetic construct
  source 1..80: mol_type = other DNA
ttactgcaacctctgcttccctgtctcagcctcctgagtagctggaattacaggcatgcaccaagacgcctgattagttt

SEQ ID NO: 103756 - DNA, 80 bp, synthetic construct
  source 1..80: mol_type = other DNA
tgcatggccagagttcaacgtttcttatgaatcactttctattattatcaagtttatgatcttgagtggttaaaatgaca

SEQ ID NO: 103757 - DNA, 80 bp, synthetic construct; identical to SEQ ID NO: 19946
  source 1..80: mol_type = other DNA

SEQ ID NO: 103758 - DNA, 80 bp, synthetic construct
  source 1..80: mol_type = other DNA
gatacaactttaagtgaaaacataattatacgtagtcactagtgcaaatgactcaactgaggagacagttggataagcat

SEQ ID NO: 103759 - DNA, 80 bp, synthetic construct
  source 1..80: mol_type = other DNA
tgatgtcaggccttctgggaagaaaataatagaacaaaacaaataaaagtagtaggacaccttatattaattgccatacc

SEQ ID NO: 103760 - DNA, 80 bp, synthetic construct
  source 1..80: mol_type = other DNA
ttcttcaaagaatatctagagccttttcaagcctggtacaaatagaaataccaatttgggggtacaggatatggacttga

SEQ ID NO: 103761 - DNA, 80 bp, synthetic construct
  source 1..80: mol_type = other DNA
ccatcggcagtatgacggcattgggggtcttgttcgggccctgccaaagacctacacgataaatggtgtgtccgtggagg

SEQ ID NO: 103762 - DNA, 80 bp, synthetic construct; identical to SEQ ID NO: 19947
  source 1..80: mol_type = other DNA

SEQ ID NO: 103763 - DNA, 80 bp, synthetic construct
  source 1..80: mol_type = other DNA
atatctcctaatgctatccctcccccctccccccaccccacaacagtccccagagtctgatgttccccttcctgtgtcca

SEQ ID NO: 103764 - DNA, 80 bp, synthetic construct
  source 1..80: mol_type = other DNA
tgtatatgtgccacattttagagatagaaacaaaagctaagttagaaagttgctcagtaatgaaacaagactaattttac

SEQ ID NO: 103765 - DNA, 80 bp, synthetic construct; identical to SEQ ID NO: 19948
  source 1..80: mol_type = other DNA

SEQ ID NO: 103766 - DNA, 80 bp, synthetic construct
  source 1..80: mol_type = other DNA
aatgttaatatatacattagggagaagaaaacggaattcagagaaaaagaatgggatgcaacacgtttttttgagtatac

SEQ ID NO: 103767 - DNA, 80 bp, synthetic construct
  source 1..80: mol_type = other DNA
gcccaggctccaccacgacacaatatatgcacgcaggaaatctgtatttgcaccccctaaatatttaaaatatttttaaa

SEQ ID NO: 103768 - DNA, 80 bp, synthetic construct
  source 1..80: mol_type = other DNA
ggatgttaaacagtgattagaagacaaatatttagcagaaaaaaaagctgatgtagttacatagatatcaggcaaaagag

SEQ ID NO: 103769 - DNA, 80 bp, synthetic construct
  source 1..80: mol_type = other DNA
tttgacagaactcaaatacaatcctgagggaagaaaacaagtgtataatgatacagactgtttcatatcatttctataca

SEQ ID NO: 103770 - DNA, 80 bp, synthetic construct; identical to SEQ ID NO: 19949
  source 1..80: mol_type = other DNA

SEQ ID NO: 103771 - DNA, 80 bp, synthetic construct
  source 1..80: mol_type = other DNA
cacaacagtaatatgtgccattaaaaagtaaatcattcattagtgataaaactcaaaatgatgttaaaaagcaaaatgct

SEQ ID NO: 103772 - DNA, 80 bp, synthetic construct
  source 1..80: mol_type = other DNA
cccttgtttaccttagtttgttctggcatgaaataagtcagacccatattagccttgggcatcaagttttttttctgacc

SEQ ID NO: 103773 - DNA, 80 bp, synthetic construct
  source 1..80: mol_type = other DNA
tctcataggctgtatgttctattcttgctctagatctaacaagaaaatgttttatagaaaagactcttggcatcgatttg

SEQ ID NO: 103774 - DNA, 80 bp, synthetic construct; identical to SEQ ID NO: 19950
  source 1..80: mol_type = other DNA

SEQ ID NO: 103775 - DNA, 80 bp, synthetic construct
  source 1..80: mol_type = other DNA
tatccagaagaaggttggacacatggttggatatccataaaattaggaatgatgtgtccaaagtatatttcattttaact

SEQ ID NO: 103776 - DNA, 80 bp, synthetic construct
  source 1..80: mol_type = other DNA
tttctaaaagatttatgaggaacttggttaactatttagatgttgctctgagctttaccccatacgtccattgtcctttc

SEQ ID NO: 103777 - DNA, 80 bp, synthetic construct; identical to SEQ ID NO: 19951
  source 1..80: mol_type = other DNA

SEQ ID NO: 103778 - DNA, 80 bp, synthetic construct
  source 1..80: mol_type = other DNA
cgcccggctaatttttttgtgtttttagtagagacggggtttcactgtgttagccaggatggtctcgatctcctgacctc

SEQ ID NO: 103779 - DNA, 80 bp, synthetic construct
  source 1..80: mol_type = other DNA
ggagttgaacgtactactagtttttttttccttgattttgataaaaatttcctgtcttatactgtgtaatttttggcctc

SEQ ID NO: 103780 - DNA, 80 bp, synthetic construct; identical to SEQ ID NO: 19952
  source 1..80: mol_type = other DNA

SEQ ID NO: 103781 - DNA, 80 bp, synthetic construct
  source 1..80: mol_type = other DNA
ccttcctcagcctgccgagtggctgggactacaggcgcccaccaccattccctgctaatttttttggtatttttagtaga

SEQ ID NO: 103782 - DNA, 80 bp, synthetic construct
  source 1..80: mol_type = other DNA
acttttaagtgaccacaacttaatggtatcaaaaaccaaattagtagaatagtataataaaaaaaaactttatataatca

SEQ ID NO: 103783 - DNA, 80 bp, synthetic construct
  source 1..80: mol_type = other DNA
gaagaactccagagagtatctggggtaaactatgataatatttggtctcaaggaagatgtgtttggtggggtcaaacatg

SEQ ID NO: 103784 - DNA, 80 bp, synthetic construct
  source 1..80: mol_type = other DNA
cactcccctgccccttacctaaagcaagtattattatccatattattctaacagaatcaaagagattgcatcatttccca

SEQ ID NO: 103785 - DNA, 80 bp, synthetic construct; identical to SEQ ID NO: 19953
  source 1..80: mol_type = other DNA

SEQ ID NO: 103786 - DNA, 80 bp, synthetic construct
  source 1..80: mol_type = other DNA
gtttgatcatctcagttatttactggaaaacagcagtgttggtcttggtaagtaaatgacttttatttcatctttaaggt

SEQ ID NO: 103787 - DNA, 80 bp, synthetic construct
  source 1..80: mol_type = other DNA
cagtgagctatcacctcacacctgttagaatgcctattattgaaaagacaaaacataataagtgttggcgagggtgtggg

SEQ ID NO: 103788 - DNA, 80 bp, synthetic construct
  source 1..80: mol_type = other DNA
aagagatacgtgtacttccatggtcattgcagcattattcacaatagctgagatatggaatcaacctaagtgttcatcag

SEQ ID NO: 103789 - DNA, 80 bp, synthetic construct; identical to SEQ ID NO: 19954
  source 1..80: mol_type = other DNA

SEQ ID NO: 103790 - DNA, 80 bp, synthetic construct
  source 1..80: mol_type = other DNA
gtgtatgtgaggtaatatgtatgttaactagctcaattgagtcattccacaaagtatacatatatttcaaaacatgtaca

SEQ ID NO: 103791 - DNA, 80 bp, synthetic construct
  source 1..80: mol_type = other DNA
ttttgtatggagtttatagttacagcacgatccaggttatatttcatcttcatttgaattaatagcctccccagctatga

SEQ ID NO: 103792 - DNA, 80 bp, synthetic construct
  source 1..80: mol_type = other DNA
taagtaaggttggtgcagaagtcattgtggttttgcaatgtgacattatggccaaaaccgcaattaattttgcaccaaca

SEQ ID NO: 103793 - DNA, 80 bp, synthetic construct
  source 1..80: mol_type = other DNA
aaacatttttctatggaaggagaaccaacgttctgtatctgtattcttatgtgtttttttcttttcgtgatatctgctgc

SEQ ID NO: 103794 - DNA, 80 bp, synthetic construct; identical to SEQ ID NO: 19955
  source 1..80: mol_type = other DNA

SEQ ID NO: 103795 - DNA, 80 bp, synthetic construct
  source 1..80: mol_type = other DNA
ctcctacatcatctgttcctacataccagcctgatttcatctcctacagctttcccgcactctctcttctttgcttcagc

SEQ ID NO: 103796 - DNA, 80 bp, synthetic construct
  source 1..80: mol_type = other DNA
cagctcttccacatccatgctgtgtaaaactgaaaccttttctccacttccttaaactcttcctgtttcctttactgctt

SEQ ID NO: 103797 - DNA, 80 bp, synthetic construct; identical to SEQ ID NO: 19956
  source 1..80: mol_type = other DNA

SEQ ID NO: 103798 - DNA, 80 bp, synthetic construct
  source 1..80: mol_type = other DNA
tctctgagacacctcaggacatgtttcccccgtatagtacttaaaatcttttaatctacacactcattaaaatggccaat

SEQ ID NO: 103799 - DNA, 80 bp, synthetic construct
  source 1..80: mol_type = other DNA
acaaattaaacatacacctaccataaactatatgcctagcctttccactgctaacaatttacccagtagaaaggaaaata

SEQ ID NO: 103800 - DNA, 80 bp, synthetic construct
  source 1..80: mol_type = other DNA
tacccatatacggtgaaatgtcatcccacaataaaaaagaatgaattgctgacatatgctacagtgtgaatgaatcccaa

SEQ ID NO: 103801 - DNA, 80 bp, synthetic construct; identical to SEQ ID NO: 19957
  source 1..80: mol_type = other DNA

SEQ ID NO: 103802 - DNA, 80 bp, synthetic construct
  source 1..80: mol_type = other DNA
ttacttccattgataatgacttttctaaggatttcttttaaaattgaatttcttgtgaaatattgtagaggactaacatt

SEQ ID NO: 103803 - DNA, 80 bp, synthetic construct
  source 1..80: mol_type = other DNA
aaatgctgtgtgtctgatttgaaccaaggatgtttgactgtgatcttaggtttttctctacgtattttctcacacctgct

SEQ ID NO: 103804 - DNA, 80 bp, synthetic construct
  source 1..80: mol_type = other DNA
aagttaaatgctattaaattcagaaacattcttctttcgtagttttacacataatcctgcagctcttggcccacccagac

SEQ ID NO: 103805 - DNA, 80 bp, synthetic construct; identical to SEQ ID NO: 19958
  source 1..80: mol_type = other DNA

SEQ ID NO: 103806 - DNA, 80 bp, synthetic construct
  source 1..80: mol_type = other DNA
catcctttaaggatgtcatttattgtatccaatgtaagcatctaatgagttttcagccaagggataactctttgttaatc

SEQ ID NO: 103807 - DNA, 80 bp, synthetic construct
  source 1..80: mol_type = other DNA
tttcttgaggtcttttgagttatcattaaaactgcatagagatataataaggattcatctcagcactttcatgaaggaag

SEQ ID NO: 103808 - DNA, 80 bp, synthetic construct
  source 1..80: mol_type = other DNA
ggattatgacatcattctataataataacaagttagtgagaatcaatagtttatgcctccataatgctttactctgaaaa

SEQ ID NO: 103809 - DNA, 80 bp, synthetic construct; identical to SEQ ID NO: 19959
  source 1..80: mol_type = other DNA

SEQ ID NO: 103810 - DNA, 80 bp, synthetic construct
  source 1..80: mol_type = other DNA
cggatccagtaaaacactgtaggtctaatatacacaccctcacgagtgatccatactacttgatgtgaaattttataaaa

SEQ ID NO: 103811 - DNA, 80 bp, synthetic construct
  source 1..80: mol_type = other DNA
ggaaatttaggttgtagaagatgcatcttatgaattttcctaggggagctagggcaaggtgggttgttgtaaatgatacg

SEQ ID NO: 103812 - DNA, 80 bp, synthetic construct
  source 1..80: mol_type = other DNA
aacctagaaaaggtttcattctgaggagtgtgatgctttgttgaggtacagaagacagatacgagaagcagtcactatct

SEQ ID NO: 103813 - DNA, 80 bp, synthetic construct; identical to SEQ ID NO: 19960
  source 1..80: mol_type = other DNA

SEQ ID NO: 103814 - DNA, 80 bp, synthetic construct
  source 1..80: mol_type = other DNA
cacacacaccatgctacatgcttatcagtttcccatgaaggaaccagggagctcttaggttctctcagtagtagaaaatg

SEQ ID NO: 103815 - DNA, 80 bp, synthetic construct
  source 1..80: mol_type = other DNA
gagggaggatgtgagcctctagggccatccagatttggctctcatcagcaagagaacatgtaattatattttccctgcag

SEQ ID NO: 103816 - DNA, 80 bp, synthetic construct
  source 1..80: mol_type = other DNA
ggtgagcaagtgcaataacatttataaagtacttgctctgggcaagcactgtactggatgccttacatgtgaccttgtat

SEQ ID NO: 103817 - DNA, 80 bp, synthetic construct
  source 1..80: mol_type = other DNA
gccatcaaataagcagttcctccttttcccctcaaaggaatcttaatactaaaatttccacagatgtgttcttggtgtta

SEQ ID NO: 103818 - DNA, 80 bp, synthetic construct; identical to SEQ ID NO: 19961
  source 1..80: mol_type = other DNA

SEQ ID NO: 103819 - DNA, 80 bp, synthetic construct
  source 1..80: mol_type = other DNA
tgctccattaaaaataatagctgcagtctaatcactgaacaagtgtttgtttagttggaaatgtctcgttggttgtaaaa

SEQ ID NO: 103820 - DNA, 80 bp, synthetic construct
  source 1..80: mol_type = other DNA
accaaaagtcattttcttttgtgtatttagctctatgtgtttgccatcgttttaggggaaagtgagagggaaggtatagg

SEQ ID NO: 103821 - DNA, 80 bp, synthetic construct
  source 1..80: mol_type = other DNA
caggctagagtgcagtggcatgatctcagctcactgcaatctatgcctcccaggttcaagtgattctcctgcctcagcct

SEQ ID NO: 103822 - DNA, 80 bp, synthetic construct; identical to SEQ ID NO: 19962
  source 1..80: mol_type = other DNA

SEQ ID NO: 103823 - DNA, 80 bp, synthetic construct
  source 1..80: mol_type = other DNA
aacacattgattggtgctggggtagttaagaactgtaagtatatttctaaagtgggatgagcatgaagccagggctttct

SEQ ID NO: 103824 - DNA, 80 bp, synthetic construct
  source 1..80: mol_type = other DNA
tgttagaaaactggagtctgatttttataaaaacttaaactttgctgctagtaagattctttcatcttagtaaatggaaa

SEQ ID NO: 103825 - DNA, 80 bp, synthetic construct
  source 1..80: mol_type = other DNA
tgggggaaaactaagtgaaggaataggggaccaaccttggcatttctgaaatttatgcatcttcacaactattatttgag

SEQ ID NO: 103826 - DNA, 80 bp, synthetic construct; identical to SEQ ID NO: 19963
  source 1..80: mol_type = other DNA

SEQ ID NO: 103827 - DNA, 80 bp, synthetic construct
  source 1..80: mol_type = other DNA
gtcagattctcagtatatcttaacagtccccaaaaggataaaaactattattctaatggatgaaccaactggcctagacc

SEQ ID NO: 103828 - DNA, 80 bp, synthetic construct
  source 1..80: mol_type = other DNA
ctagacagaattgtaacattgatgtcacaaagttgttctaatgtttttttttcccctgtatagttgattcatgccgggaa

SEQ ID NO: 103829 - DNA, 80 bp, synthetic construct; identical to SEQ ID NO: 19964
  source 1..80: mol_type = other DNA

SEQ ID NO: 103830 - DNA, 80 bp, synthetic construct
  source 1..80: mol_type = other DNA
ccgggttcaagcaattctcctgcctcagcctcccaagtagctgggactacaggcgcccgtcaccatgcccggctaatttt

SEQ ID NO: 103831 - DNA, 80 bp, synthetic construct
  source 1..80: mol_type = other DNA
tttaaagctgtgtttgctttgggattttaattttcttttatatgacatttcagacagcttccagagaagcagaaacatgc

SEQ ID NO: 103832 - DNA, 80 bp, synthetic construct
  source 1..80: mol_type = other DNA
atgcttttctattaaaagcactgatgatagcttttgacttagagattttaaaatcccctctctgttaaaaagagtgtttg

SEQ ID NO: 103833 - DNA, 80 bp, synthetic construct
  source 1..80: mol_type = other DNA
caccacgttgggctaattttttgcattttttgtagagacagggtttcaccatgttagccaggatggtctcgacctcctga

SEQ ID NO: 103834 - DNA, 80 bp, synthetic construct; identical to SEQ ID NO: 19965
  source 1..80: mol_type = other DNA

SEQ ID NO: 103835 - DNA, 80 bp, synthetic construct
  source 1..80: mol_type = other DNA
gagttcgagaccagcctggacaacatggcaaaaccccatctctactaaaaatacaaaagttaaacaagcatggtggtggg

SEQ ID NO: 103836 - DNA, 80 bp, synthetic construct
  source 1..80: mol_type = other DNA
aggaagtgcatgctatatatattccttttctttcattaattatgcccctagagaaggcaggctataatagctcaagtcta

SEQ ID NO: 103837 - DNA, 80 bp, synthetic construct; identical to SEQ ID NO: 19966
  source 1..80: mol_type = other DNA

SEQ ID NO: 103838 - DNA, 80 bp, synthetic construct
  source 1..80: mol_type = other DNA
tttgtaataacataataacaaagaaccaagaacatagattgtaagagagcccaggggtcctttacagaatgggccccaaa

SEQ ID NO: 103839 - DNA, 80 bp, synthetic construct
  source 1..80: mol_type = other DNA
atatgcagtatattgtctacatcgggagtcacagtggtttgtgtgtgtgtttgtgaattttgtatcagtcacaatgaaag

SEQ ID NO: 103840 - DNA, 80 bp, synthetic construct
  source 1..80: mol_type = other DNA
ctcctgcttcagcctcccgagtagctgggactacaggcgcccgccactatgcccggctaattcttttgtatttttcgtag

SEQ ID NO: 103841 - DNA, 80 bp, synthetic construct
  source 1..80: mol_type = other DNA
tgcttttttcagccaggtgtggtggtgcacgcctgtagtcccagctactcaggagtctgaggcaggagaatcacttgaac

SEQ ID NO: 103842 - DNA, 80 bp, synthetic construct; identical to SEQ ID NO: 19967
  source 1..80: mol_type = other DNA

SEQ ID NO: 103843 - DNA, 80 bp, synthetic construct
  source 1..80: mol_type = other DNA
gcctcagaataataatgaaagaaggaggggttcagaaaacttgaggaacaagcacataatcttgcagctcttggcccaga

SEQ ID NO: 103844 - DNA, 80 bp, synthetic construct
  source 1..80: mol_type = other DNA
cttgagccaatccgtgagtcttgagttacaggcagatgcatttgtggcattcattagaaacaatgtctgcttggataaga

SEQ ID NO: 103845 - DNA, 80 bp, synthetic construct
  source 1..80: mol_type = other DNA
aatcataatatactgatttgacactaaggttaagtcagctttggctggattttaaatccagttttagttggtttaaatac

SEQ ID NO: 103846 - DNA, 80 bp, synthetic construct; identical to SEQ ID NO: 19968
  source 1..80: mol_type = other DNA

SEQ ID NO: 103847 - DNA, 80 bp, synthetic construct
  source 1..80: mol_type = other DNA
attttattcatcagtttattcaggatgattgtggtcatgtgtcttctttctctgagttcttatttctttgatgttgtatc

SEQ ID NO: 103848 - DNA, 80 bp, synthetic construct
  source 1..80: mol_type = other DNA
agggaacctacggagtgactataaggaattcactaatctctataggcataaagctttaagtgttgatagagaaagcaata

SEQ ID NO: 103849 - DNA, 80 bp, synthetic construct
  source 1..80: mol_type = other DNA
tcatgtttaaaacaggctcacttagaaaagagtgaacatccccacttcacattttcacttttcatggatttcacttggag

SEQ ID NO: 103850 - DNA, 80 bp, synthetic construct; identical to SEQ ID NO: 19969
  source 1..80: mol_type = other DNA

SEQ ID NO: 103851 - DNA, 80 bp, synthetic construct
  source 1..80: mol_type = other DNA
ttgtaatctatcctgtatatgacacagccattgacaccaaaattcacttctctcttttagatgggaatgtggtggaacct

SEQ ID NO: 103852 - DNA, 80 bp, synthetic construct
  source 1..80: mol_type = other DNA
agcgatggacttcctcctctcttgactcttcactctgtgccttatgatgttcttttttatatatccattcattaatttat

SEQ ID NO: 103853 - DNA, 80 bp, synthetic construct; identical to SEQ ID NO: 19970
  source 1..80: mol_type = other DNA

SEQ ID NO: 103854 - DNA, 80 bp, synthetic construct
  source 1..80: mol_type = other DNA
aatggattgaaggctgttctgtatattgggtggcccacatggagaatctgccattatcagcttaaatgttcttttctttg

SEQ ID NO: 103855 - DNA, 80 bp, synthetic construct
  source 1..80: mol_type = other DNA
caaagcacattaggacttgagccgacagtagccccttcatgaaatatatgagagcagaatcacaaaaatgaaatgaaaat

SEQ ID NO: 103856 - DNA, 80 bp, synthetic construct
  source 1..80: mol_type = other DNA
tgagatctattgtgagaataagctcctctctttgcctagcaaaggaaaatactcacatctgtgatattattgtcttctta

SEQ ID NO: 103857 - DNA, 80 bp, synthetic construct
  source 1..80: mol_type = other DNA
taaagaatacatttccatgtgtcatagtgctatcatcttccggatagtgaaattgtatgtccccatgttaatccctttga

SEQ ID NO: 103858 - DNA, 80 bp, synthetic construct; identical to SEQ ID NO: 19971
  source 1..80: mol_type = other DNA

SEQ ID NO: 103859 - DNA, 80 bp, synthetic construct
  source 1..80: mol_type = other DNA
gaaacattttccataccacaaatttaattcattttaggtagtcccatatactgaggtatgagtcttctctgatcgccctt

SEQ ID NO: 103860 - DNA, 80 bp, synthetic construct
  source 1..80: mol_type = other DNA
tgggagtccttggccactttaggtgagatgaatagatctccccttttgactgtgtttgatgatttaactcatcttctaga

SEQ ID NO: 103861 - DNA, 80 bp, synthetic construct; identical to SEQ ID NO: 19972
  source 1..80: mol_type = other DNA

SEQ ID NO: 103862 - DNA, 80 bp, synthetic construct
  source 1..80: mol_type = other DNA
tgtaaaattgaaccaaaatgcctatctcacagatattttctaagtattacatgaggtaaaacacttgctgttgcctgaca

SEQ ID NO: 103863 - DNA, 80 bp, synthetic construct
  source 1..80: mol_type = other DNA
aagtcttaggaaacagtggagtctgcatttgtgagtggttaggaaagaaaggaggagaacagaaacatcttctgtatcaa

SEQ ID NO: 103864 - DNA, 80 bp, synthetic construct
  source 1..80: mol_type = other DNA
ctaatgaatgatctacttagtttagaaacatttcttggcattatgaacattagctttgttccaacagacaactgagacct

SEQ ID NO: 103865 - DNA, 80 bp, synthetic construct; identical to SEQ ID NO: 19973
  source 1..80: mol_type = other DNA

SEQ ID NO: 103866 - DNA, 80 bp, synthetic construct
  source 1..80: mol_type = other DNA
ttaggagatcgagaccatcctagctaacacggtgaaaccccgtctctataaaaaatacaaaaaattagccggacgtggtg

SEQ ID NO: 103867 - DNA, 80 bp, synthetic construct
  source 1..80: mol_type = other DNA
gataagccaagatactcttaagttggaaaacatggtaataggcctggcctaaaatattattagaaacctcgagagataaa

SEQ ID NO: 103868 - DNA, 80 bp, synthetic construct
  source 1..80: mol_type = other DNA
agaaaaatcactggtattttctctaactttattattctgttcaggatcaagtctcactctatcttactgagttgggaatg

SEQ ID NO: 103869 - DNA, 80 bp, synthetic construct
  source 1..80: mol_type = other DNA
agaagtatgagatataaagagtctatatggagctgttacagtaagcatccctggatatttagcaaaagtaatctttctct

SEQ ID NO: 103870 - DNA, 80 bp, synthetic construct; identical to SEQ ID NO: 19974
  source 1..80: mol_type = other DNA

SEQ ID NO: 103871 - DNA, 80 bp, synthetic construct
  source 1..80: mol_type = other DNA
tcgttagatataggaaagggtcaaaatatgtatagtcataagatcattttattaatttgacaaatatagatcaagaataa

SEQ ID NO: 103872 - DNA, 80 bp, synthetic construct
  source 1..80: mol_type = other DNA
caaataagtgatcagagtagagcaattttggaacttcacttggagaagtaagttttgtggcaagccatagagaggcagag

SEQ ID NO: 103873 - DNA, 80 bp, synthetic construct; identical to SEQ ID NO: 19975
  source 1..80: mol_type = other DNA

SEQ ID NO: 103874 - DNA, 80 bp, synthetic construct
  source 1..80: mol_type = other DNA
aagccagttcaagtcccaaaacctcaaaagtagggaagccaacagtgcagccttcagtctgtggccgaaggcccgtgagc

SEQ ID NO: 103875 - DNA, 80 bp, synthetic construct
  source 1..80: mol_type = other DNA
gctgattagatggtgcccacccagattgagaatgggtcagcctctcccagtccactgactcaaatgttaatctcctttgg

SEQ ID NO: 103876 - DNA, 80 bp, synthetic construct
  source 1..80: mol_type = other DNA
atatgggattgggcaatttcacttcagatgaccttataatgtagcattagagtgtgatatgaggagaaatgaaaaaaaaa

SEQ ID NO: 103877 - DNA, 80 bp, synthetic construct
  source 1..80: mol_type = other DNA
ctggggcatttttgatgccctgtctcaaaaggtaatttaatggtttgtgggtttgtttgtatcaataaaatggtatagag

SEQ ID NO: 103878 - DNA, 80 bp, synthetic construct; identical to SEQ ID NO: 19976
  source 1..80: mol_type = other DNA

SEQ ID NO: 103879 - DNA, 80 bp, synthetic construct
  source 1..80: mol_type = other DNA
gttgcattgcatatgtggcattgccttatagttgcaaaatttataatgaatagttcatatgttttcagatgactgacagg

SEQ ID NO: 103880 - DNA, 80 bp, synthetic construct
  source 1..80: mol_type = other DNA
ggtagcaacactttaatgctttttcttaccgaatttcctttggtaaactgagtccttttaaaataatgtgtaagtatttt

SEQ ID NO: 103881 - DNA, 80 bp, synthetic construct
  source 1..80: mol_type = other DNA
ttttccagctcagaattttatttttcaaagctttataatgcaacatggatcagttaaaatttctcactctctagaatgtt

SEQ ID NO: 103882 - DNA, 80 bp, synthetic construct; identical to SEQ ID NO: 19977
  source 1..80: mol_type = other DNA

SEQ ID NO: 103883 - DNA, 80 bp, synthetic construct
  source 1..80: mol_type = other DNA
ttcagttagtccagggtaattcagattttcttctgcaaccttctgtcagccctgatgatcatgctgacaacttttgccat

SEQ ID NO: 103884 - DNA, 80 bp, synthetic construct
  source 1..80: mol_type = other DNA
tctgaagggaactttaacccacaacctgttgatacctcaaagtatggactctttctattgcagcagatttttattgtaaa

SEQ ID NO: 103885 - DNA, 80 bp, synthetic construct
  source 1..80: mol_type = other DNA
cttctaggatactcttaacacaatcaagactctgtacatggaatatctataatagaattaagaaagtatgtcagttatat

SEQ ID NO: 103886 - DNA, 80 bp, synthetic construct; identical to SEQ ID NO: 19978
  source 1..80: mol_type = other DNA

SEQ ID NO: 103887 - DNA, 80 bp, synthetic construct
  source 1..80: mol_type = other DNA
catgccaccttatcttactgattctatggtgactcagcaagatcagttttagcaaggtagacacttggtagttattatcc

SEQ ID NO: 103888 - DNA, 80 bp, synthetic construct
  source 1..80: mol_type = other DNA
agaaaagaccctttcccccatcccccagtatttggcttatatgattgatcttttgtatctcttccgaagtaagtaaacca

SEQ ID NO: 103889 - DNA, 80 bp, synthetic construct; identical to SEQ ID NO: 19979
  source 1..80: mol_type = other DNA

SEQ ID NO: 103890 - DNA, 80 bp, synthetic construct
  source 1..80: mol_type = other DNA
tgtatatatatttaattttccattcatagatacgttttaagccttagatttatcatcagacttggtcatcatttgcatgt

SEQ ID NO: 103891 - DNA, 80 bp, synthetic construct
  source 1..80: mol_type = other DNA
actaaatttagtgcttgttttttcttttttgtgtaatctattgtcctaatctttgaatgtattttaattatttcaattta

SEQ ID NO: 103892 - DNA, 80 bp, synthetic construct
  source 1..80: mol_type = other DNA
cgtgtttaacagttaaaattgaatgagatataagcattcataagctgtgagtaaattattaatatgatttcctgtaaatt

SEQ ID NO: 103893 - DNA, 80 bp, synthetic construct
  source 1..80: mol_type = other DNA
tgactggtcactgttcaaatatttctgaccatgacagttttctgttttaaaatgagaacttgatctaaattaggaaaaaa

SEQ ID NO: 103894 - DNA, 80 bp, synthetic construct; identical to SEQ ID NO: 19980
  source 1..80: mol_type = other DNA

SEQ ID NO: 103895 - DNA, 80 bp, synthetic construct
  source 1..80: mol_type = other DNA
accataccttgctaattgttaatattttttatagagatgagatcttgctatgttgcccaggctggtctccaactgttgtt

SEQ ID NO: 103896 - DNA, 80 bp, synthetic construct
  source 1..80: mol_type = other DNA
tgttgtatttcttactaccaactagatctgcagtttactaaaaatagattacatcggccaggtgatttttttgtgtgttt

SEQ ID NO: 103897 - DNA, 80 bp, synthetic construct
  source 1..80: mol_type = other DNA
gttgagttgagatagttcaagaactaaaatacttctatattggtttggcgaaatgaaaatcagacaccaaaggttgcttc

SEQ ID NO: 103898 - DNA, 80 bp, synthetic construct; identical to SEQ ID NO: 19981
  source 1..80: mol_type = other DNA

SEQ ID NO: 103899 - DNA, 80 bp, synthetic construct
  source 1..80: mol_type = other DNA
gagaagacgctgagatgcatactctagttttcctatttaaaatgcatgttttgtatttacacttcataggtggggtccca

SEQ ID NO: 103900 - DNA, 80 bp, synthetic construct
  source 1..80: mol_type = other DNA
atcatgcaatatgtccatgtaacaaaactgcacatttactccctgaatctgaaatttaaaataaaagaaaatagcattga

SEQ ID NO: 103901 - DNA, 80 bp, synthetic construct; identical to SEQ ID NO: 19982
  source 1..80: mol_type = other DNA

SEQ ID NO: 103902 - DNA, 80 bp, synthetic construct
  source 1..80: mol_type = other DNA
tatattttgtcttttcctctcaattcttaatttctgtcagcctttctgtgtttattctcttctctccttaacatttttct

SEQ ID NO: 103903 - DNA, 80 bp, synthetic construct
  source 1..80: mol_type = other DNA
ttgacaaatgaagtgaaaaggatttcacttcattgtgagtcacatgtatattacataagctgtcccttttttctgtgtaa

SEQ ID NO: 103904 - DNA, 80 bp, synthetic construct
  source 1..80: mol_type = other DNA
tcaaatttttaaaaagtgaaggcagtctattttagagcaaagcgttacttaacatttttatttacattcataatatatct

SEQ ID NO: 103905 - DNA, 80 bp, synthetic construct; identical to SEQ ID NO: 19983
  source 1..80: mol_type = other DNA

SEQ ID NO: 103906 - DNA, 80 bp, synthetic construct
  source 1..80: mol_type = other DNA
agtttcaaaggaggttaaatgatgattaagttactggactttatgtacaagccttccttttcctggctagtatagaagaa

SEQ ID NO: 103907 - DNA, 80 bp, synthetic construct
  source 1..80: mol_type = other DNA
cagggagtggggggctaggggagggatagcattaagagaaatacctaatgtagatgacgggttgatgggtgcagcaaacc

SEQ ID NO: 103908 - DNA, 80 bp, synthetic construct
  source 1..80: mol_type = other DNA
gttttcctaatgaaaacagtacatcatgttcgtttgctacagctagtttgtctatagggctttcttctcatttccagtgg

SEQ ID NO: 103909 - DNA, 80 bp, synthetic construct
  source 1..80: mol_type = other DNA
gaattcacagaagatgttgctgctggaccatgtcaagggagttcgacaaacaagcaaggctctacccataggtcttcggt

SEQ ID NO: 103910 - DNA, 80 bp, synthetic construct; identical to SEQ ID NO: 19984
  source 1..80: mol_type = other DNA

SEQ ID NO: 103911 - DNA, 80 bp, synthetic construct
  source 1..80: mol_type = other DNA
tactttacattcaattgtctttgggatgtatcatatatggatggaagctataaaagtgtattttatctatttttttgtct

SEQ ID NO: 103912 - DNA, 80 bp, synthetic construct
  source 1..80: mol_type = other DNA
catggtatggtaagggtgggactagtggtatgaataaggcactacacagtatagagaaagggatgtttttttttttaatt

SEQ ID NO: 103913 - DNA, 80 bp, synthetic construct
  source 1..80: mol_type = other DNA
ctttttgttctaatagtaagcccttaatagaccctattaacccgtgaaaccatctctcatgtcttagtgattttcacggt

SEQ ID NO: 103914 - DNA, 80 bp, synthetic construct; identical to SEQ ID NO: 19985
  source 1..80: mol_type = other DNA

SEQ ID NO: 103915 - DNA, 80 bp, synthetic construct
  source 1..80: mol_type = other DNA
tacaccaaaggccacaagtctatttataacttgccattattttcacccaaaggttctttaagcataaaccaatattattt

SEQ ID NO: 103916 - DNA, 80 bp, synthetic construct
  source 1..80: mol_type = other DNA
aacactttttatagcatcattttataaaaggaatacaaatggatgagtgaagatcatgtgtagatgtgattctgagcctg

SEQ ID NO: 103917 - DNA, 80 bp, synthetic construct; identical to SEQ ID NO: 19986
  source 1..80: mol_type = other DNA

SEQ ID NO: 103918 - DNA, 80 bp, synthetic construct
  source 1..80: mol_type = other DNA
tcgttatgtggatcaataacctgatgaatgtcctttgtttaccatgaataccacaggaagacatgaatcctgatttcagg

SEQ ID NO: 103919 - DNA, 80 bp, synthetic construct
  source 1..80: mol_type = other DNA
tgaccccctccttggtagggatactaaagaaaacagcaaaaaacatttctgacaatttcaggcatatcccacaggttttc

SEQ ID NO: 103920 - DNA, 80 bp, synthetic construct
  source 1..80: mol_type = other DNA
ggagattagaatgaaacttttggaatgtgtttcttatctagaactaaaatacaagataggatagaggaatggtgcattca

SEQ ID NO: 103921 - DNA, 80 bp, synthetic construct
  source 1..80: mol_type = other DNA
tgcattgttctaagcttttcaaatagatcagtgatgaaatggaaaaaaatctctgctgtcaaggagcttacattctaatg

SEQ ID NO: 103922 - DNA, 80 bp, synthetic construct; identical to SEQ ID NO: 19987
  source 1..80: mol_type = other DNA

SEQ ID NO: 103923 - DNA, 80 bp, synthetic construct
  source 1..80: mol_type = other DNA
agctgtgttaggtgaggtaaagaccataggagtgctggggacagcaaggagagaataatgactttgattttatatgttgt

SEQ ID NO: 103924 - DNA, 80 bp, synthetic construct
  source 1..80: mol_type = other DNA
tcaggcactttgctaaggattttacatccattacctagtttcataccaacctttgaggctggtggcctatttagcatatt

SEQ ID NO: 103925 - DNA, 80 bp, synthetic construct
  source 1..80: mol_type = other DNA
agatgcgtgcctgtaatcccagctactcgggaggctgaggcaggagaatcgcttgaacctgggaggcagaggttgcagcg

SEQ ID NO: 103926 - DNA, 80 bp, synthetic construct
  source 1..80: mol_type = other DNA
gagagtttggggctgccctgcggctggataatgtttatagataaaacgggatgctcaaaaaacagcagtgaggtacagag

SEQ ID NO: 103927 - DNA, 80 bp, synthetic construct; identical to SEQ ID NO: 19988
  source 1..80: mol_type = other DNA

SEQ ID NO: 103928 - DNA, 80 bp, synthetic construct
  source 1..80: mol_type = other DNA
cacataacatgccattgggtggaaggaggtaagtgcccaggatggttagtgaaacttccttaaaattgataaagaggtat

SEQ ID NO: 103929 - DNA, 80 bp, synthetic construct
  source 1..80: mol_type = other DNA
tcctaacatttgacccatcaagacatttgtaaatattgacgtctttgattaactcttgcttgcgtgaggaagagtaaatt

SEQ ID NO: 103930 - DNA, 80 bp, synthetic construct
  source 1..80: mol_type = other DNA
attttaatgtgcgagatgtgtttacaacatcattttgtatagaaacttgccagttttatctaaggaaacactatgtttgg

SEQ ID NO: 103931 - DNA, 80 bp, synthetic construct; identical to SEQ ID NO: 19989
  source 1..80: mol_type = other DNA

SEQ ID NO: 103932 - DNA, 80 bp, synthetic construct
  source 1..80: mol_type = other DNA
atggatccatggaatttatagattatatactctaattttttaatgctatcaaaattgatagctgggtgtggtggcacgtg

SEQ ID NO: 103933 - DNA, 80 bp, synthetic construct
  source 1..80: mol_type = other DNA
agggtgtttcagccgtataacatattttcctttaatagccatttaaaaatctctatgttaaatagttgtgtgtgagaaga

SEQ ID NO: 103934 - DNA, 80 bp, synthetic construct
  source 1..80: mol_type = other DNA
attgccttgagacataaagttaataggtcaatatggtgttcaaataacatattagcattgttggtaactgtattgttcca

SEQ ID NO: 103935 - DNA, 80 bp, synthetic construct; identical to SEQ ID NO: 19990
  source 1..80: mol_type = other DNA

SEQ ID NO: 103936 - DNA, 80 bp, synthetic construct
  source 1..80: mol_type = other DNA
atgaccattttcatttgctgtttagttactgtataatattgcaaatccttacaattctctgggattcacattctaaagaa

SEQ ID NO: 103937 - DNA, 80 bp, synthetic construct
  source 1..80: mol_type = other DNA
atatttttgttcatttaaggctatggcagaaatgatggctgaaaactaccataatatatgggcaaagaaaaagaaaatgg

SEQ ID NO: 103938 - DNA, 80 bp, synthetic construct
  source 1..80: mol_type = other DNA
tcagaacggtttaattgtgcctgtaacagattgaagttggaaatgctgtaatttcctagtggctagtatatattttcttg

SEQ ID NO: 103939 - DNA, 80 bp, synthetic construct; identical to SEQ ID NO: 19991
  source 1..80: mol_type = other DNA

SEQ ID NO: 103940 - DNA, 80 bp, synthetic construct
  source 1..80: mol_type = other DNA
gttagtctatacacatattgtttataatgtggtgtctgtgtgtgtgcgcgcatatgcgctgtcgttaatgacttcctata

SEQ ID NO: 103941 - DNA, 80 bp, synthetic construct; identical to SEQ ID NO: 19992
  source 1..80: mol_type = other DNA

SEQ ID NO: 103942 - DNA, 80 bp, synthetic construct
  source 1..80: mol_type = other DNA
taggacaatagtggagggaaggtcagcagataaacaagtgaacaaaggtctctggttttcctaggcagaggaccctgcgg

SEQ ID NO: 103943 - DNA, 80 bp, synthetic construct
  source 1..80: mol_type = other DNA
gggttgggggtaaggtcacagatcaacaggatcccaaggcagaagaatttttcttagtacagaacaaaatgaaaagtctc

SEQ ID NO: 103944 - DNA, 80 bp, synthetic construct
  source 1..80: mol_type = other DNA
aggggctcctcacttcccagtaggggcggccgggcagaggcgcccctcacctcccggacggggcggctggccgggcgggg

SEQ ID NO: 103945 - DNA, 80 bp, synthetic construct; identical to SEQ ID NO: 19993
  source 1..80: mol_type = other DNA

SEQ ID NO: 103946 - DNA, 80 bp, synthetic construct
  source 1..80: mol_type = other DNA
tgcaatctcggcattttgggaggccaaggcaggcggctgggaggtggaggttgtagcgagccgagatcacgccactgcac

SEQ ID NO: 103947 - DNA, 80 bp, synthetic construct
  source 1..80: mol_type = other DNA
cagcgaaaccccgtctccaccaaaaaaatacgaaaaccagtcaggcgtggcggcgcgcgcctgcaatcgcaggcactcgg

SEQ ID NO: 103948 - DNA, 80 bp, synthetic construct; identical to SEQ ID NO: 19994
  source 1..80: mol_type = other DNA

SEQ ID NO: 103949 - DNA, 80 bp, synthetic construct
  source 1..80: mol_type = other DNA
acagggtattgcccacataactggtaaacaaaatcactgcttattacatgagcagattacatgaaaaaatgtctgttcct

SEQ ID NO: 103950 - DNA, 80 bp, synthetic construct
  source 1..80: mol_type = other DNA
ctggttcagcatcccaaatcccaaatccaaaagcttaaatgctccaataagtgtttcctttgagcatcatgtagatactc

SEQ ID NO: 103951 - DNA, 80 bp, synthetic construct
  source 1..80: mol_type = other DNA
tccatacttctgcatacaacttgtactggctcaaatttgtattctgtagttgggaaactaacctagtggcagcagactaa

SEQ ID NO: 103952 - DNA, 80 bp, synthetic construct; identical to SEQ ID NO: 19995
  source 1..80: mol_type = other DNA

SEQ ID NO: 103953 - DNA, 80 bp, synthetic construct
  source 1..80: mol_type = other DNA
tctttttttcaaagttgttttctcactcagagacattaatagtggggaggatccttatagccaacagttgtaggcagttg

SEQ ID NO: 103954 - DNA, 80 bp, synthetic construct
  source 1..80: mol_type = other DNA
aaagaatcagggccaaagctgcacagttttgttttcacccattctcttctcttttatcatccctgcatctgtgcagagaa

SEQ ID NO: 103955 - DNA, 80 bp, synthetic construct
  source 1..80: mol_type = other DNA
tagtgcccccaaattagtaaaaaatgttattttcccactgccacttcaagtattttgtaccatggtcatctgttgttaag

SEQ ID NO: 103956 - DNA, 80 bp, synthetic construct; identical to SEQ ID NO: 19996
  source 1..80: mol_type = other DNA

SEQ ID NO: 103957 - DNA, 80 bp, synthetic construct
  source 1..80: mol_type = other DNA
tctttaaagcatctttctctttctctccccacttcccccacagtaacttattggtatgcggccccaaaatcactgattac

SEQ ID NO: 103958 - DNA, 80 bp, synthetic construct
  source 1..80: mol_type = other DNA
tacagtgtgatatttgcatacatgtatacaatgtgtaatgatcaaatcagggtaattagccaacccatcacctcaaacat

SEQ ID NO: 103959 - DNA, 80 bp, synthetic construct; identical to SEQ ID NO: 19997
  source 1..80: mol_type = other DNA

SEQ ID NO: 103960 - DNA, 80 bp, synthetic construct
  source 1..80: mol_type = other DNA
ctagggaagcagacatttcctcctttgcttgcttatttattgtgtagggctaattcaacatttgtgattgttgcagtagc

SEQ ID NO: 103961 - DNA, 80 bp, synthetic construct
  source 1..80: mol_type = other DNA
tgttagatgtgaggcataccatgctattcggtttgctgctgttttaatagcattctttgtatcagatctttacatctgaa

SEQ ID NO: 103962 - DNA, 80 bp, synthetic construct
  source 1..80: mol_type = other DNA
tcaggataagtatactaggaatctagactcttgctaaaatgtacttgcccacgtggtttaaagtcaagtattagacactt

SEQ ID NO: 103963 - DNA, 80 bp, synthetic construct
  source 1..80: mol_type = other DNA
tgaaacatgccttataacttttctaaatccagctaagtatgatttagcatttgtttctactctccacattcagaattgct

SEQ ID NO: 103964 - DNA, 80 bp, synthetic construct; identical to SEQ ID NO: 19998
  source 1..80: mol_type = other DNA

SEQ ID NO: 103965 - DNA, 80 bp, synthetic construct
  source 1..80: mol_type = other DNA
caagttcttgcagatcaatggatatgctgtatccaggtaaaagtacacataccctaagtacacactcttttcacaagagt

SEQ ID NO: 103966 - DNA, 80 bp, synthetic construct
  source 1..80: mol_type = other DNA
aaatcagcatccatcatttaggcaaaatccccaggcaaaaaatcacactctgtttttgtaaatgcaacacttcgttgcat

SEQ ID NO: 103967 - DNA, 80 bp, synthetic construct
  source 1..80: mol_type = other DNA
cacacaattttaccttctaagaggctttgtacaaattgctttcccattttcatttttgctcttccagaggatttaaggac

SEQ ID NO: 103968 - DNA, 80 bp, synthetic construct; identical to SEQ ID NO: 19999
  source 1..80: mol_type = other DNA

SEQ ID NO: 103969 - DNA, 80 bp, synthetic construct
  source 1..80: mol_type = other DNA
ttgaaagatacattggaaggacatcagaatttgaaggtagagttaaatctcgcctatgaaatcagttgctctactcataa

SEQ ID NO: 103970 - DNA, 80 bp, synthetic construct
  source 1..80: mol_type = other DNA
cagtgctgtctcaaaatttttaaaacctcattctttaagtcttagattcagcacagatgatgaaagcagcctccggtcac

SEQ ID NO: 103971 - DNA, 80 bp, synthetic construct
  source 1..80: mol_type = other DNA
catttattttcattttcgttctcgacgttttctctttgtttttaacactcactccttttgtcattcaacacctttcctct

SEQ ID NO: 103972 - DNA, 80 bp, synthetic construct; identical to SEQ ID NO: 20000
  source 1..80: mol_type = other DNA

SEQ ID NO: 103973 - DNA, 80 bp, synthetic construct
  source 1..80: mol_type = other DNA
gtaggggtgaattattgaagcttttacacacaaagctaaatattgcaatttctgatctacatttgaaaggatccgatatg

SEQ ID NO: 103974 - DNA, 80 bp, synthetic construct
  source 1..80: mol_type = other DNA
ttattcacagtttattcaaatttctgaataaactacctactacagttttcttgtatgggggtggggagaatcttgctcca

SEQ ID NO: 103975 - DNA, 80 bp, synthetic construct; identical to SEQ ID NO: 20001
  source 1..80: mol_type = other DNA

SEQ ID NO: 103976 - DNA, 80 bp, synthetic construct
  source 1..80: mol_type = other DNA
aaaaatatgcatatgcctttttctaattgttgtataataccgtagattgtaatctctccacatctttttcacattttgca

SEQ ID NO: 103977 - DNA, 80 bp, synthetic construct
  source 1..80: mol_type = other DNA
tatgaatccagccattttgcataatgtgcttaagagagattcaaatgccaaagtgccatgcaaatgaaatttgcaagtgt

SEQ ID NO: 103978 - DNA, 80 bp, synthetic construct
  source 1..80: mol_type = other DNA
ttcaagcaaaagtcagcttggctcttgaatatctggaagctctgcttacaaattttactaaaacctgatagctctccaat

SEQ ID NO: 103979 - DNA, 80 bp, synthetic construct
  source 1..80: mol_type = other DNA
tgaaggaggtgagaaaggccaccttctaagctaaatgaattaggttaatcaattcttgaccttggtaaaccatggggaaa

SEQ ID NO: 103980 - DNA, 80 bp, synthetic construct; identical to SEQ ID NO: 20002
  source 1..80: mol_type = other DNA

SEQ ID NO: 103981 - DNA, 80 bp, synthetic construct
  source 1..80: mol_type = other DNA
ctctattctattccattttcccctctctatgtcaataagatctcaaagctacacaaatgtgtttgtgtctctaaccacaa

SEQ ID NO: 103982 - DNA, 80 bp, synthetic construct
  source 1..80: mol_type = other DNA
tatggatgaatatcttgcaatgtttccagtgcagcatttacctaaaaactcttcaaatctacagatggtggcagcagagg

SEQ ID NO: 103983 - DNA, 80 bp, synthetic construct; identical to SEQ ID NO: 20003
  source 1..80: mol_type = other DNA

SEQ ID NO: 103984 - DNA, 80 bp, synthetic construct
  source 1..80: mol_type = other DNA
aataggaaagtctgagttaattcataaataggcacattataagaacatttagtacagaatattgtgggaccttagtcctg

SEQ ID NO: 103985 - DNA, 80 bp, synthetic construct
  source 1..80: mol_type = other DNA
aaagtctccgaatgatttaatgcatttacttagtatttactgtgtgtctagtgtgggtcaggcattagggtatggcccag

SEQ ID NO: 103986 - DNA, 80 bp, synthetic construct
  source 1..80: mol_type = other DNA
ttgtttaggacaccttgcagtgagcctgaagacctaattactgctgtctgcttccttttaaagtacttgcattcagcgat

SEQ ID NO: 103987 - DNA, 80 bp, synthetic construct; identical to SEQ ID NO: 20004
  source 1..80: mol_type = other DNA

SEQ ID NO: 103988 - DNA, 80 bp, synthetic construct
  source 1..80: mol_type = other DNA
tttaaaatacattcttgtgttgcccgtatactcagcacccccggtgcatctgtttacagatgcttaatgtggcttaattt

SEQ ID NO: 103989 - DNA, 80 bp, synthetic construct
  source 1..80: mol_type = other DNA
tatatagctgtgctctaccacatggtaggaaaaagaagtatgtttagatagacatgagtttgaatactggtagtgccgat

SEQ ID NO: 103990 - DNA, 80 bp, synthetic construct
  source 1..80: mol_type = other DNA
gagactttaatccaaagtcccacgcatacaatgtaaaattgcaaatgatgttatcagagctcagaatgtgggactttatc

SEQ ID NO: 103991 - DNA, 80 bp, synthetic construct; identical to SEQ ID NO: 20005
  source 1..80: mol_type = other DNA

SEQ ID NO: 103992 - DNA, 80 bp, synthetic construct
  source 1..80: mol_type = other DNA
gcaatgttcacacatagtagagactcaacatatggtagttatggattattttggggtctgctgggcactgaactatgtta

SEQ ID NO: 103993 - DNA, 80 bp, synthetic construct
  source 1..80: mol_type = other DNA
taaggagacctgttgcatgtgaacagaactctgactgctccaaagcctcagctcccattcatcccctgaaagattccact

SEQ ID NO: 103994 - DNA, 80 bp, synthetic construct
  source 1..80: mol_type = other DNA
agctataaaaataagcactgttgtatgacttaggtgtatatgcagttgcaaagaaaacctgaggaccttgaagtggggct

SEQ ID NO: 103995 - DNA, 80 bp, synthetic construct; identical to SEQ ID NO: 20006
  source 1..80: mol_type = other DNA

SEQ ID NO: 103996 - DNA, 80 bp, synthetic construct
  source 1..80: mol_type = other DNA
ctataaaatttctgaagctttcccctcttaacaatgctttctcatttctgtttaaaccaaagggttctttatggactcag

SEQ ID NO: 103997 - DNA, 80 bp, synthetic construct
  source 1..80: mol_type = other DNA
agtgaatacacagtataaagcagaacactggagaaaatacagactttccttggacttgacgtcgatgctgtgctgaaagg

SEQ ID NO: 103998 - DNA, 80 bp, synthetic construct
  source 1..80: mol_type = other DNA
ttgtcagttcatctctttcacttattgtctattttaccaagtagcaagtggccagtcatgtgatatgggattgcaacagt

SEQ ID NO: 103999 - DNA, 80 bp, synthetic construct
  source 1..80: mol_type = other DNA
tataaaattgattatagttaaaataacagcaggaatccatcccagcggcgtgctttgtttccacaaattgctgccacatg

SEQ ID NO: 104000 - DNA, 80 bp, synthetic construct; identical to SEQ ID NO: 20007
  source 1..80: mol_type = other DNA

SEQ ID NO: 104001 - DNA, 80 bp, synthetic construct
  source 1..80: mol_type = other DNA
gtcttgtgttttattatctccattcagtttcagccttacccttagaactattcactgagcccatactatgcatatatcga

SEQ ID NO: 104002 - DNA, 80 bp, synthetic construct
  source 1..80: mol_type = other DNA
caattctgtatccctcatagaataaatcagaggtacatcgctattttgtgctagcctcagttgatgtccctttggggctc

SEQ ID NO: 104003 - DNA, 80 bp, synthetic construct
  source 1..80: mol_type = other DNA
atacaaataccattttgttacagttgcctacagtattcggtacagtaacatgctgcacaagtatgtagcctggagcaata

SEQ ID NO: 104004 - DNA, 80 bp, synthetic construct; identical to SEQ ID NO: 20008
  source 1..80: mol_type = other DNA

SEQ ID NO: 104005 - DNA, 80 bp, synthetic construct
  source 1..80: mol_type = other DNA
aatgataaatgatggtgcatgtctgtacaaaatgctgtgcagtcattaacattatgatggagatgagtataatactttcg

SEQ ID NO: 104006 - DNA, 80 bp, synthetic construct
  source 1..80: mol_type = other DNA
ccctgccactatgaataaataagcatgtcttcattcgcatgataaacactatgataatggttttaagtgtttaacagacg

SEQ ID NO: 104007 - DNA, 80 bp, synthetic construct
  source 1..80: mol_type = other DNA
agctaaatacgtgaatatgagtatagccctagtgaaagccaggcagtaagatgggattcaaagtaaagtaagaccacctt

SEQ ID NO: 104008 - DNA, 80 bp, synthetic construct; identical to SEQ ID NO: 20009
  source 1..80: mol_type = other DNA

SEQ ID NO: 104009 - DNA, 80 bp, synthetic construct
  source 1..80: mol_type = other DNA
cattaatactaagaagctattaaagctttttatgtgaaagaatgatcagagcttccctctgagaaatacagtctggcagc

SEQ ID NO: 104010 - DNA, 80 bp, synthetic construct
  source 1..80: mol_type = other DNA
tgttggaagtgctgcctcaaataggtggtgctgcccactgatccatttagcaggtgggtctttttcttcttcttcttctt

SEQ ID NO: 104011 - DNA, 80 bp, synthetic construct
  source 1..80: mol_type = other DNA
tttattatttttagtagagatagggtttcaccatgttggccaggctggtcttgaactcctgacctcaggtgatccgccca

SEQ ID NO: 104012 - DNA, 80 bp, synthetic construct; identical to SEQ ID NO: 20010
  source 1..80: mol_type = other DNA

SEQ ID NO: 104013 - DNA, 80 bp, synthetic construct
  source 1..80: mol_type = other DNA
atttcaactctgggtagttggaacattgttggtatcatgaatagaaacaacatatttcagaaaaagaatcgtttcgaaga

SEQ ID NO: 104014 - DNA, 80 bp, synthetic construct
  source 1..80: mol_type = other DNA
tatataatgcttgaagctccgaggaagtagataaaactgaaggagagtagagaaagaggcaaaaggttttgaataccctg

SEQ ID NO: 104015 - DNA, 80 bp, synthetic construct
  source 1..80: mol_type = other DNA
ccaaaaaagaaaaggttattatctttgctcattaggggcattggtgagctgcaaaggagtgttttagtacaagacaatga

SEQ ID NO: 104016 - DNA, 80 bp, synthetic construct; identical to SEQ ID NO: 20011
  source 1..80: mol_type = other DNA

SEQ ID NO: 104017 - DNA, 80 bp, synthetic construct
  source 1..80: mol_type = other DNA
aaacatcctaggtttggattaattgagtaagacctaatcctagcattataaattctggatcatcaagaatatctcagaat

SEQ ID NO: 104018 - DNA, 80 bp, synthetic construct
  source 1..80: mol_type = other DNA
cagtagataagggcacgtggacaaagtttctcctgttttattgtcttaaaattatagcacaaagataaataaggcaggtc

SEQ ID NO: 104019 - DNA, 80 bp, synthetic construct
  source 1..80: mol_type = other DNA
catcaatacatgaatccacattgttacagaagtgaggggtgatggccaaaacttactgtaaaagaggtcaacctcacaaa

SEQ ID NO: 104020 - DNA, 80 bp, synthetic construct; identical to SEQ ID NO: 20012
  source 1..80: mol_type = other DNA

SEQ ID NO: 104021 - DNA, 80 bp, synthetic construct
  source 1..80: mol_type = other DNA
gagggctggatgtcagaacgctgacctacttattttattgagtttatttagtttaatgagtttattcttggaagaaactc

SEQ ID NO: 104022 - DNA, 80 bp, synthetic construct
  source 1..80: mol_type = other DNA
tgagagttagtggataccagcgttgtcaggctgaatgctgaatgtgggcagccattatttggaatggctcattgctaatt

SEQ ID NO: 104023 - DNA, 80 bp, synthetic construct
  source 1..80: mol_type = other DNA
cagttgctcaaattctgttcctactttactgtattcaaattcactggatgcttacgttacgtaaggagtgtgatcaaggt

SEQ ID NO: 104024 - DNA, 80 bp, synthetic construct
  source 1..80: mol_type = other DNA
cagagtttcagtggtacatttgggcagataaaaccaaattttttcctggtggtttttcagtagttatatccttatggggt

SEQ ID NO: 104025 - DNA, 80 bp, synthetic construct; identical to SEQ ID NO: 20013
  source 1..80: mol_type = other DNA

SEQ ID NO: 104026 - DNA, 80 bp, synthetic construct
  source 1..80: mol_type = other DNA
ggtaaggagacccttgaaaaaatacaagcatggccatcacttggttttctttgccatttttgcactgtgttgtgtgctgc

SEQ ID NO: 104027 - DNA, 80 bp, synthetic construct
  source 1..80: mol_type = other DNA
attaaagagcaaatgaatgaaaatggcaggctgtgccgtattttatctcaggggtaaaaacaaaacaaagccaggccctt

SEQ ID NO: 104028 - DNA, 80 bp, synthetic construct
  source 1..80: mol_type = other DNA
cttcggagcttcacttggcaagagtggcttttctagcaccactcactccagggtcagtttctgtttgtttctgagaattc

SEQ ID NO: 104029 - DNA, 80 bp, synthetic construct; identical to SEQ ID NO: 20014
  source 1..80: mol_type = other DNA

SEQ ID NO: 104030 - DNA, 80 bp, synthetic construct
  source 1..80: mol_type = other DNA
atacacacacacacatatgcacaaataagttcttcacattacactttttgagaaataatagtttctggatatagtaggtt

SEQ ID NO: 104031 - DNA, 80 bp, synthetic construct
  source 1..80: mol_type = other DNA
gacttttgtttaacttctcttcaacagagaaatattttcatgggcttattcaggcaggattttcatacactctttaacct

SEQ ID NO: 104032 - DNA, 80 bp, synthetic construct
  source 1..80: mol_type = other DNA
tgcggtcttattaatgagcataataatactttctatggtgctatttctaacttcctgcttattgtatatccttcttttcc

SEQ ID NO: 104033 - DNA, 80 bp, synthetic construct; identical to SEQ ID NO: 20015
  source 1..80: mol_type = other DNA

SEQ ID NO: 104034 - DNA, 80 bp, synthetic construct
  source 1..80: mol_type = other DNA
tgtatatgcatatacaaccatttaatcatagctcaagccaagacatagaacgtttccaacatgccaggagcctcccctgt

SEQ ID NO: 104035 - DNA, 80 bp, synthetic construct
  source 1..80: mol_type = other DNA
gtgaaaaactagaccttaacattagttccttccctgtgtggtcctagtatttcaattagacattgtggtttcatccctta

SEQ ID NO: 104036 - DNA, 80 bp, synthetic construct; identical to SEQ ID NO: 20016
  source 1..80: mol_type = other DNA

SEQ ID NO: 104037 - DNA, 80 bp, synthetic construct
  source 1..80: mol_type = other DNA
acggggtttcaccatgttggccaggctggtctcgaactcctgacttcaggtgatctgcccacctcggtctgccaaagtgc

SEQ ID NO: 104038 - DNA, 80 bp, synthetic construct
  source 1..80: mol_type = other DNA
gaaaacctagttgtaagtcctatttttctaacttaacagctgaatgatttggacaagggacttaaattctctgaacctgc

SEQ ID NO: 104039 - DNA, 80 bp, synthetic construct
  source 1..80: mol_type = other DNA
ctaaagcttattatactttatttacataaattacatactaaactagtagacttagccctttaaaatacacacacagggcc

SEQ ID NO: 104040 - DNA, 80 bp, synthetic construct
  source 1..80: mol_type = other DNA
atacaaaaaattagccatgtctggtggcatacacctttggtcccagctactcaggaggctggggtgggaggattgcttga

SEQ ID NO: 104041 - DNA, 80 bp, synthetic construct; identical to SEQ ID NO: 20017
  source 1..80: mol_type = other DNA

SEQ ID NO: 104042 - DNA, 80 bp, synthetic construct
  source 1..80: mol_type = other DNA
tactgtcttgtatttcctgtactatcttggtttaaagattttttcatgacctaaacctaagagtaaattaagacagaatt

SEQ ID NO: 104043 - DNA, 80 bp, synthetic construct
  source 1..80: mol_type = other DNA
attgtggtgagcagagtttgatgggtaatggaatatttattctaggttggctgccacattgtaattatatctccaaacct

SEQ ID NO: 104044 - DNA, 80 bp, synthetic construct
  source 1..80: mol_type = other DNA
agacatttaaaccattttatgttatgtttaaaaagctaaggtttttaaaaaggaagacaagcggtattacccatagaatt

SEQ ID NO: 104045 - DNA, 80 bp, synthetic construct; identical to SEQ ID NO: 20018
  source 1..80: mol_type = other DNA

SEQ ID NO: 104046 - DNA, 80 bp, synthetic construct
  source 1..80: mol_type = other DNA
gtggcacaggtggtgcttatcagagtgccttaaaggctttctttttacatgtgaaaataaatcaaatgccttgatgatac

SEQ ID NO: 104047 - DNA, 80 bp, synthetic construct
  source 1..80: mol_type = other DNA
tactgaccattctctctgaatcccctcctgcttctctcaactgtgttccacgatgatcttatcaaatcttctcaaaacac

SEQ ID NO: 104048 - DNA, 80 bp, synthetic construct
  source 1..80: mol_type = other DNA
cagcttccttggccttctctctgcctcttgaatgtgttagattcctttctgcccagggtttttgcacatgctgtaattat

SEQ ID NO: 104049 - DNA, 80 bp, synthetic construct; identical to SEQ ID NO: 20019
  source 1..80: mol_type = other DNA

SEQ ID NO: 104050 - DNA, 80 bp, synthetic construct
  source 1..80: mol_type = other DNA
tcaagaagcctatagtctaatagagaaggtagataagtacgcagacacttactatgagacaagtgctaagaacgtggaaa

SEQ ID NO: 104051 - DNA, 80 bp, synthetic construct
  source 1..80: mol_type = other DNA
tcttattccttaagaggtccatgaaaacacttaggccacttacagtgaatagaaaataacacataattaatgacccttaa

SEQ ID NO: 104052 - DNA, 80 bp, synthetic construct
  source 1..80: mol_type = other DNA
tcctcagagttagtggagaatttgtgaattaatcacataggtacatctaggaatacctgatgttattacaaaaagccagc

SEQ ID NO: 104053 - DNA, 80 bp, synthetic construct
  source 1..80: mol_type = other DNA
tgagtatgcctgacttataccagtagataaatcttaatgttacgtttggaagagttttaaaagtagatactaaataaagt

SEQ ID NO: 104054 - DNA, 80 bp, synthetic construct; identical to SEQ ID NO: 20020
  source 1..80: mol_type = other DNA

SEQ ID NO: 104055 - DNA, 80 bp, synthetic construct
  source 1..80: mol_type = other DNA
ctcgggaggctgaggcaggagaatggcgtgaacccaggaggtggagtttgcagtgagccgagatcatgccagtgcactcc

SEQ ID NO: 104056 - DNA, 80 bp, synthetic construct
  source 1..80: mol_type = other DNA
agaatgtaatggttcaatcatgcgcaatctgtaactattttcttatccttgttattcgtagctggaggatcattgagatc

SEQ ID NO: 104057 - DNA, 80 bp, synthetic construct
  source 1..80: mol_type = other DNA
acatagcattagatcaacatagtattagagcgatacagataattctttcagttgaacatagcattataggagaatttcct

SEQ ID NO: 104058 - DNA, 80 bp, synthetic construct; identical to SEQ ID NO: 20021
  source 1..80: mol_type = other DNA

SEQ ID NO: 104059 - DNA, 80 bp, synthetic construct
  source 1..80: mol_type = other DNA
ttgagaattcctgagttatagaaactttatttaaaaaaacaatttgggattaatatgcaaaaattatttatagttatatt

SEQ ID NO: 104060 - DNA, 80 bp, synthetic construct
  source 1..80: mol_type = other DNA
atacacaatcttaaggacaaataggcaatctatcattgtttccctgagtgctcagaggtgatgagaggtgtgtatctgag

SEQ ID NO: 104061 - DNA, 80 bp, synthetic construct; identical to SEQ ID NO: 20022
  source 1..80: mol_type = other DNA

SEQ ID NO: 104062 - DNA, 80 bp, synthetic construct
  source 1..80: mol_type = other DNA
attttttacatagaggtgtttctatttaaagttgtgctgtgtctaaaaggggtctaccaagatgtaaaaatgtgtggagt

SEQ ID NO: 104063 - DNA, 80 bp, synthetic construct
  source 1..80: mol_type = other DNA
ttctaggtgcagggaacaaagcaaacaaaaatcccagcctgccaggcttatattaatagaagtttaaagtatccctggcc

SEQ ID NO: 104064 - DNA, 80 bp, synthetic construct
  source 1..80: mol_type = other DNA
actcatatacgttgcactggatctcttcctcctcatgggccttctctttcccattgtctatactgcatctttcttatctt

SEQ ID NO: 104065 - DNA, 80 bp, synthetic construct
  source 1..80: mol_type = other DNA
atagctctggcttagatctcttccctgcactgcagacttttttttttttttcaatcaattgcctattctacatctttacc

SEQ ID NO: 104066 - DNA, 80 bp, synthetic construct; identical to SEQ ID NO: 20023
  source 1..80: mol_type = other DNA

SEQ ID NO: 104067 - DNA, 80 bp, synthetic construct
  source 1..80: mol_type = other DNA
tgctcaaaacctaagaatgtcttcctaccgcactgaaaatccaagggcttgctctaaccaagctctagaacctgacctct

SEQ ID NO: 104068 - DNA, 80 bp, synthetic construct
  source 1..80: mol_type = other DNA
tatttcttcatgtcattccaacctctgctcaaatgccgcctccaggaaggactcatgagcactatccctgttattctacc

SEQ ID NO: 104069 - DNA, 80 bp, synthetic construct
  source 1..80: mol_type = other DNA
gatatataatatatttatagaaatatatattatataatataattatatataatctttttgtatataacaaatatttttta

SEQ ID NO: 104070 - DNA, 80 bp, synthetic construct; identical to SEQ ID NO: 20024
  source 1..80: mol_type = other DNA

SEQ ID NO: 104071 - DNA, 80 bp, synthetic construct
  source 1..80: mol_type = other DNA
actaaactggcttgcccatgttctaatacaattattaatttcagtgtgtacttaggtcattcattttaggttactttttg

SEQ ID NO: 104072 - DNA, 80 bp, synthetic construct
  source 1..80: mol_type = other DNA
aagtggtcaaattattttgttaccttgaattcatcattttatttgctttctgtatccccattacgaagaaaaatatatgt

SEQ ID NO: 104073 - DNA, 80 bp, synthetic construct
  source 1..80: mol_type = other DNA
tggtgctttttggtttttgccaaagaccaataacattcaaggaaattaatttaccttcatgcaatggaattcaggcaaat

SEQ ID NO: 104074 - DNA, 80 bp, synthetic construct; identical to SEQ ID NO: 20025
  source 1..80: mol_type = other DNA

SEQ ID NO: 104075 - DNA, 80 bp, synthetic construct
  source 1..80: mol_type = other DNA
agcattttgtttcctctttaggcaatgatgcaacatcaattgtcaactgtcttcatattttgggtcagactttggatgca

SEQ ID NO: 104076 - DNA, 80 bp, synthetic construct
  source 1..80: mol_type = other DNA
aatgtcaggtaatttctgtagcagctaggaccataaaggagggttgaactggtaatgtatcacgcaggaaaaatggtaat

SEQ ID NO: 104077 - DNA, 80 bp, synthetic construct
  source 1..80: mol_type = other DNA
catctgtgtgctttctactctgccctgtcaacttgaccagaaatctagcatgttgaccaaatacaaaatcagttcattta

SEQ ID NO: 104078 - DNA, 80 bp, synthetic construct; identical to SEQ ID NO: 20026
  source 1..80: mol_type = other DNA

SEQ ID NO: 104079 - DNA, 80 bp, synthetic construct
  source 1..80: mol_type = other DNA
tagttaaattggagaccgttagtgataagcatacagcattagcacagacttttgcagcaaggttttaataagttgactat

SEQ ID NO: 104080 - DNA, 80 bp, synthetic construct
  source 1..80: mol_type = other DNA
ttgttcctgttggaagatacgagtcctcccttatttactttctaggacagtgatgaagactggcctggagagtgttaaaa

SEQ ID NO: 104081 - DNA, 80 bp, synthetic construct
  source 1..80: mol_type = other DNA
attacaccacagtggccctgctgccaatgctgtcttcattatttgaacatattggccagcatcagttcggagaagaccta

SEQ ID NO: 104082 - DNA, 80 bp, synthetic construct; identical to SEQ ID NO: 20027
  source 1..80: mol_type = other DNA

SEQ ID NO: 104083 - DNA, 80 bp, synthetic construct
  source 1..80: mol_type = other DNA
tctgagtcaatgtagattgtttctccaagcttgacaatgtaataatgtgaagacgactgagacaaagtctgtgtctaaat

SEQ ID NO: 104084 - DNA, 80 bp, synthetic construct
  source 1..80: mol_type = other DNA
tgggctggcattcagtagttaataaaactatacacagaatgcccaagattacgtggaaaaaatacgcatgagctgtttga

SEQ ID NO: 104085 - DNA, 80 bp, synthetic construct
  source 1..80: mol_type = other DNA
gtgggtgccacaactaccagtggcagaacgtttattttaaattttgttttaagaaagcatgcttagtccgggtgcagtgg

SEQ ID NO: 104086 - DNA, 80 bp, synthetic construct; identical to SEQ ID NO: 20028
  source 1..80: mol_type = other DNA

SEQ ID NO: 104087 - DNA, 80 bp, synthetic construct
  source 1..80: mol_type = other DNA
cgtcatccaccccctcctgccccctcacccttctgagtcttgtctattattctcctctctatgtccatgtgtacacatgg

SEQ ID NO: 104088 - DNA, 80 bp, synthetic construct
  source 1..80: mol_type = other DNA
atagcttaagctttctcaggacaatgtataaataagtgggtttttctttcaagtgagattctctttttccttagtggaag

SEQ ID NO: 104089 - DNA, 80 bp, synthetic construct
  source 1..80: mol_type = other DNA
tgctttgggaaccagcaagagtatttacgtggagaggtaagaatgtttaaagtttaactttgtattaattgctgcttcaa

SEQ ID NO: 104090 - DNA, 80 bp, synthetic construct; identical to SEQ ID NO: 20029
  source 1..80: mol_type = other DNA

SEQ ID NO: 104091 - DNA, 80 bp, synthetic construct
  source 1..80: mol_type = other DNA
aaataaagagatcactggcaactttagtaagaaatttctgtgaaccagagaagaaaaacagggaagtttttttaaaaggt

SEQ ID NO: 104092 - DNA, 80 bp, synthetic construct
  source 1..80: mol_type = other DNA
taaacccatgagactagccaacggaatttgcaggggaataaaagagtaatgaacaggtactcatttggcctaccaaatat

SEQ ID NO: 104093 - DNA, 80 bp, synthetic construct
  source 1..80: mol_type = other DNA
gacctatattaaggaagtataataatttattgatatgtgactttatttttgacatgttggctgttttctgtttttcacta

SEQ ID NO: 104094 - DNA, 80 bp, synthetic construct
  source 1..80: mol_type = other DNA
acattctcaaattttagaagtgaatgctaatttcctcatttgttccttactcagattatcttttttttctttttagtgct

SEQ ID NO: 104095 - DNA, 80 bp, synthetic construct; identical to SEQ ID NO: 20030
  source 1..80: mol_type = other DNA

SEQ ID NO: 104096 - DNA, 80 bp, synthetic construct
  source 1..80: mol_type = other DNA
gttttattattctgataagtttagactacacatttagcagttagaatttcaaacatttatcctcctagacttttcatgct

SEQ ID NO: 104097 - DNA, 80 bp, synthetic construct
  source 1..80: mol_type = other DNA
aaatattatagtggcaaggtatagtttgtcctatgaataatcacacaatttggagaacaaggtagtcgagaatgtgtctt

SEQ ID NO: 104098 - DNA, 80 bp, synthetic construct; identical to SEQ ID NO: 20031
  source 1..80: mol_type = other DNA

SEQ ID NO: 104099 - DNA, 80 bp, synthetic construct
  source 1..80: mol_type = other DNA
atgtatttactagattacatttagaatttctattctgttctattatttgattttttatgactaaatcaatatcatatagc

SEQ ID NO: 104100 - DNA, 80 bp, synthetic construct
  source 1..80: mol_type = other DNA
tggtttttggtggcttgttttttaagtcttttttgtgcaattaattttgcggttataaagtgattggggaaacaaaaaaa

SEQ ID NO: 104101 - DNA, 80 bp, synthetic construct
  source 1..80: mol_type = other DNA
gtctgagaatcactaattgaaacagaattttaaagtgaattaatgaaataaaaggactagtccaatcagatatgaggaaa

SEQ ID NO: 104102 - DNA, 80 bp, synthetic construct
  source 1..80: mol_type = other DNA
taattgtaatatgacttttttagttactcacttggaagaccttaaaacataagcattttccacttataggcaacgttctg

SEQ ID NO: 104103 - DNA, 80 bp, synthetic construct; identical to SEQ ID NO: 20032
  source 1..80: mol_type = other DNA

SEQ ID NO: 104104 - DNA, 80 bp, synthetic construct
  source 1..80: mol_type = other DNA
gatagatgagggagatatgatacatatagggcagcaatcagaatatgtggtaattcaagagcaaggtgactgagcaggcc

SEQ ID NO: 104105 - DNA, 80 bp, synthetic construct
  source 1..80: mol_type = other DNA
actggataatgtccccaccaagttagggcatgctcaagataggctggagagaaaaagagaagtttaaatttagatccatc

SEQ ID NO: 104106 - DNA, 80 bp, synthetic construct
  source 1..80: mol_type = other DNA
ccaaaaaagagaagagaatcaaagatagattcctaaagataatcagcatttgaaagttcagcaagggctgggcgcagtgg

SEQ ID NO: 104107 - DNA, 80 bp, synthetic construct
  source 1..80: mol_type = other DNA
ccgggcgtggtggtgtgtgcctgtaatcctggctactcaggaggctgaggcatgagaatcgcttgaactggggaggcaga

SEQ ID NO: 104108 - DNA, 80 bp, synthetic construct; identical to SEQ ID NO: 20033
  source 1..80: mol_type = other DNA

SEQ ID NO: 104109 - DNA, 80 bp, synthetic construct
  source 1..80: mol_type = other DNA
aaagatttgagtatcttgctgggtaggaggtattacagggctgaaaatacaggtctgagcaaggcatcaggtatttggtg

SEQ ID NO: 104110 - DNA, 80 bp, synthetic construct
  source 1..80: mol_type = other DNA
tactattgtttgctgtaaagtaggaggaatggctgttttctgggagtgatggtacagtaggaacttaggggaaagagaga

SEQ ID NO: 104111 - DNA, 80 bp, synthetic construct; identical to SEQ ID NO: 20034
  source 1..80: mol_type = other DNA

SEQ ID NO: 104112 - DNA, 80 bp, synthetic construct
  source 1..80: mol_type = other DNA
catgaacacacttctagggaacatattgaaaatcatatataataacttggggattgatgagggagcctggatgaagaggc

SEQ ID NO: 104113 - DNA, 80 bp, synthetic construct
  source 1..80: mol_type = other DNA
aaaaacaggcattgggtatatgttaaatagttactacttttaagtaaacatttttctgacttgtcaatctctgtaagatt

SEQ ID NO: 104114 - DNA, 80 bp, synthetic construct
  source 1..80: mol_type = other DNA
tgtagccatctgttatatagagaatgtgaagagaagggagggtaaaccaaaaaaatgtagtctaatgtctacaattattg

SEQ ID NO: 104115 - DNA, 80 bp, synthetic construct
  source 1..80: mol_type = other DNA
tgcaatggtgagatcttggctcactgcaacctccgcctcccgggttcaagtgattctcctgcctcagcctcccgggtagc

SEQ ID NO: 104116 - DNA, 80 bp, synthetic construct; identical to SEQ ID NO: 20035
  source 1..80: mol_type = other DNA

SEQ ID NO: 104117 - DNA, 80 bp, synthetic construct
  source 1..80: mol_type = other DNA
tagatgattatggttgactttaacttttctcttgtatacttttccccagtgcatatatgttactttcagggggaaaaaag

SEQ ID NO: 104118 - DNA, 80 bp, synthetic construct
  source 1..80: mol_type = other DNA
gtagcagagcttgtccctattctaagggttaggggaaccttttccatttgggaattttatttcttgtgtgaaaatgattt

SEQ ID NO: 104119 - DNA, 80 bp, synthetic construct; identical to SEQ ID NO: 20036
  source 1..80: mol_type = other DNA

SEQ ID NO: 104120 - DNA, 80 bp, synthetic construct
  source 1..80: mol_type = other DNA
aactcatttcttgccgttaatggagaaactcaagaaaaaggcagctacggtggtgtctgaggaagaccacctgaaagctg

SEQ ID NO: 104121 - DNA, 80 bp, synthetic construct
  source 1..80: mol_type = other DNA
gtttcttggctcacatgtccttgttcaatcgcttcattcactattttgccatgagcttgttggtaattataattaactgt

SEQ ID NO: 104122 - DNA, 80 bp, synthetic construct
  source 1..80: mol_type = other DNA
gtggtcagtacatttaactttggggggatggttttttttttttaaattaactttaaggagtagctgagaaaccactttat

SEQ ID NO: 104123 - DNA, 80 bp, synthetic construct; identical to SEQ ID NO: 20037
  source 1..80: mol_type = other DNA

SEQ ID NO: 104124 - DNA, 80 bp, synthetic construct
  source 1..80: mol_type = other DNA
ttaatttgcagttctcagtttgagacgtgcttaaatagactagcaatttccaacaataacccacactcattttacttgta

SEQ ID NO: 104125 - DNA, 80 bp, synthetic construct
  source 1..80: mol_type = other DNA
actattttgtgtattgcaagtggaactatgtatttttaaacctggaaaagattttaatcataacaatcgtatagtagtct

SEQ ID NO: 104126 - DNA, 80 bp, synthetic construct
  source 1..80: mol_type = other DNA
agatatcttaccagtttacttaatcagactgttgtacaaatcaagttactttgaatacataatattttttaaatatgcat

SEQ ID NO: 104127 - DNA, 80 bp, synthetic construct; identical to SEQ ID NO: 20038
  source 1..80: mol_type = other DNA

SEQ ID NO: 104128 - DNA, 80 bp, synthetic construct
  source 1..80: mol_type = other DNA
cctgtccctaaatacatacatgaatgaatgtataaataaatgaattccagaagaaatcagtccattttgagctgccaaaa

SEQ ID NO: 104129 - DNA, 80 bp, synthetic construct
  source 1..80: mol_type = other DNA
tttgaagaactgaaactcttcagtttcctcgatcattaaaatgccgaagaagcgtctttagatttaggtacaagactaaa

SEQ ID NO: 104130 - DNA, 80 bp, synthetic construct
  source 1..80: mol_type = other DNA
tatttaaagataaattgattttgccagtctttttatgttcccaaattaaaagggaataaataatgatatggtattttaaa

SEQ ID NO: 104131 - DNA, 80 bp, synthetic construct; identical to SEQ ID NO: 20039
  source 1..80: mol_type = other DNA

SEQ ID NO: 104132 - DNA, 80 bp, synthetic construct
  source 1..80: mol_type = other DNA
gaatttcaaaagagaagagcagaacttcgttgtacagaatgaaatcaacaatatgtctttccttattactgataccaagt

SEQ ID NO: 104133 - DNA, 80 bp, synthetic construct
  source 1..80: mol_type = other DNA
ttttaaggttactggaatttgtttgaatcaggcatggtaagacatgcagacgggaaatgactgtcatgaaggaagacatt

SEQ ID NO: 104134 - DNA, 80 bp, synthetic construct
  source 1..80: mol_type = other DNA
aggtttctgattggctaatttgaatacttttcaggggctccacatcatagggcctgtccttggctgcctggtacctagtc

SEQ ID NO: 104135 - DNA, 80 bp, synthetic construct
  source 1..80: mol_type = other DNA
agggactgctgtctccccaggatcagcaaatctccaagatgtcagagcaacagaataaagacatgcttcacacacacaca

SEQ ID NO: 104136 - DNA, 80 bp, synthetic construct; identical to SEQ ID NO: 20040
  source 1..80: mol_type = other DNA

SEQ ID NO: 104137 - DNA, 80 bp, synthetic construct
  source 1..80: mol_type = other DNA
tgtggtaacatttggctgccaaatggccaaagatccaaaaatgactgctactcaggcagagcaaattagcctctactgac

SEQ ID NO: 104138 - DNA, 80 bp, synthetic construct
  source 1..80: mol_type = other DNA
taggcctagtcttgtttaagagttttgaatgccctgtgtttgacccgacagcacatgaactagaagctaatgccagaagt

SEQ ID NO: 104139 - DNA, 80 bp, synthetic construct; identical to SEQ ID NO: 20041
  source 1..80: mol_type = other DNA

SEQ ID NO: 104140 - DNA, 80 bp, synthetic construct
  source 1..80: mol_type = other DNA
ctcctgcctcagcctcccaagtagctgggactatacaggcgcatgccaccatgcccagttaattttcgtatttttagtag

SEQ ID NO: 104141 - DNA, 80 bp, synthetic construct
  source 1..80: mol_type = other DNA
gcatttattacaagttctctgtgtttatttgtgggtgtgagaaaggtgggttttgcctgttgcattatacaattgtactc

SEQ ID NO: 104142 - DNA, 80 bp, synthetic construct
  source 1..80: mol_type = other DNA
aaattttttgtaagttcccacagaaaggtcatgtgataaatacaaccaattaaaactgtgctttctgttcataatgtggc

SEQ ID NO: 104143 - DNA, 80 bp, synthetic construct; identical to SEQ ID NO: 20042
  source 1..80: mol_type = other DNA

SEQ ID NO: 104144 - DNA, 80 bp, synthetic construct
  source 1..80: mol_type = other DNA
aaaacgtacgagagaaagaaactgataggatagtcaaagatgtcagaggtaagtgaggatttgaataggtcttggaaaat

SEQ ID NO: 104145 - DNA, 80 bp, synthetic construct
  source 1..80: mol_type = other DNA
taaagctattttctgtgaaattgttacaatcatatttgtatgtttgtgggtgtgtgagagacagagatagagaggaggca

SEQ ID NO: 104146 - DNA, 80 bp, synthetic construct
  source 1..80: mol_type = other DNA
actaaaaatacaaaaaaaaaattagccaggcgtggtggtgggtgcctctaatcccagctacttgggaggctgaggcagag

SEQ ID NO: 104147 - DNA, 80 bp, synthetic construct
  source 1..80: mol_type = other DNA
cacttcccttcttaaatatgcccacatatgggccatgttattacatcttcatatctgatccaaatgcacagattgaaaat

SEQ ID NO: 104148 - DNA, 80 bp, synthetic construct; identical to SEQ ID NO: 20043
  source 1..80: mol_type = other DNA

SEQ ID NO: 104149 - DNA, 80 bp, synthetic construct
  source 1..80: mol_type = other DNA
attgtttgtgtataagtaggaattcatttgcctagtgttactcaaaattgagcaatttgtagatgtgtttagtgttgatt

SEQ ID NO: 104150 - DNA, 80 bp, synthetic construct
  source 1..80: mol_type = other DNA
agactaagaaaactccaaaccaatacaatttagactatattggggatgtcgctttgctgaaactaaattaccggtattgg

SEQ ID NO: 104151 - DNA, 80 bp, synthetic construct
  source 1..80: mol_type = other DNA
caaattattcatcatattttttctaataaacttactgagaataatctcttacaagttggtatgtataaaaatgggattca

SEQ ID NO: 104152 - DNA, 80 bp, synthetic construct; identical to SEQ ID NO: 20044
  source 1..80: mol_type = other DNA

SEQ ID NO: 104153 - DNA, 80 bp, synthetic construct
  source 1..80: mol_type = other DNA
caaataagtggatgtgggacaattattttaattttgacattagaacatgccatcttgatagaatactcattacccagtga

SEQ ID NO: 104154 - DNA, 80 bp, synthetic construct
  source 1..80: mol_type = other DNA
tctactagacggggactgaggctctaggaagacaagtttgcagactgtataaaagaaaaatgcattttataattgttctg

SEQ ID NO: 104155 - DNA, 80 bp, synthetic construct
  source 1..80: mol_type = other DNA
catttgtcttctaaaaattacgtgggaatgcataccagtgaattataatgacctaggaatctgagggtaggacttgaaat

SEQ ID NO: 104156 - DNA, 80 bp, synthetic construct
  source 1..80: mol_type = other DNA
ttctacatgtgagaaaagcaggttcagatcccagcacttctctttgttccataggcagctgtttctgatcaggaaaggaa

SEQ ID NO: 104157 - DNA, 80 bp, synthetic construct; identical to SEQ ID NO: 20045
  source 1..80: mol_type = other DNA

SEQ ID NO: 104158 - DNA, 80 bp, synthetic construct
  source 1..80: mol_type = other DNA
gtttttatttgtaagttatgttaatcacctccgggacacattcaagaaccaaacaggaaagacacaaaccaatctctggt

SEQ ID NO: 104159 - DNA, 80 bp, synthetic construct
  source 1..80: mol_type = other DNA
agataaggtgttgacttttaaatcagctgctgttctcctctgcaagatttaagttcctctgcaagatttaagttctcaag

SEQ ID NO: 104160 - DNA, 80 bp, synthetic construct; identical to SEQ ID NO: 20046
  source 1..80: mol_type = other DNA

SEQ ID NO: 104161 - DNA, 80 bp, synthetic construct
  source 1..80: mol_type = other DNA
aaacatgctatgcccccttcttcttatgaattggaaacttgattccattgaatttcaatgtccttactgtggaggtaaag

SEQ ID NO: 104162 - DNA, 80 bp, synthetic construct
  source 1..80: mol_type = other DNA
tagaagactccttttaggtaacatatatttcttgacagaaagataccgaggatgaagtacgagatataatccgcagcaat

SEQ ID NO: 104163 - DNA, 80 bp, synthetic construct
  source 1..80: mol_type = other DNA
ttttgtattaaaaattctaaagataataaatgatatatttttaaagaaaattaccagagattgtcaaattttggaaaaaa

SEQ ID NO: 104164 - DNA, 80 bp, synthetic construct; identical to SEQ ID NO: 20047
  source 1..80: mol_type = other DNA

SEQ ID NO: 104165 - DNA, 80 bp, synthetic construct
  source 1..80: mol_type = other DNA
ctacttgggtggctgaggtgggaggatggcttgagcctgggaggtggaggttgcagtgaaccaagaccgtgccactgcac

SEQ ID NO: 104166 - DNA, 80 bp, synthetic construct
  source 1..80: mol_type = other DNA
aagaaaagaggtttaattgattcacggttctgcaggctgtacagaaagtataacacgggcatctgcttttggggaggttc

SEQ ID NO: 104167 - DNA, 80 bp, synthetic construct
  source 1..80: mol_type = other DNA
ccccgcctccaacactgaggattacatttccacataaggctgctaaaccacttatgaaagttttgccccatgatcaactc

SEQ ID NO: 104168 - DNA, 80 bp, synthetic construct; identical to SEQ ID NO: 20048
  source 1..80: mol_type = other DNA

SEQ ID NO: 104169 - DNA, 80 bp, synthetic construct
  source 1..80: mol_type = other DNA
acctgtgatgcagttttaaaagtcaagctagtattttgactcagcctgttgtcttctattctgggtgtcccttctgagga

SEQ ID NO: 104170 - DNA, 80 bp, synthetic construct
  source 1..80: mol_type = other DNA
gcattttaaagaataagataaaggtgagacatgcctttaccatattcacaatgcacaagtattcattcagagcaaatttc

SEQ ID NO: 104171 - DNA, 80 bp, synthetic construct
  source 1..80: mol_type = other DNA
ctacaaacatttttcccctatagggagagacactaaatgtttttatgtacatgggtatttgagaagatcaggtaccccat

SEQ ID NO: 104172 - DNA, 80 bp, synthetic construct; identical to SEQ ID NO: 20049
  source 1..80: mol_type = other DNA

SEQ ID NO: 104173 - DNA, 80 bp, synthetic construct
  source 1..80: mol_type = other DNA
tcttgaatacattgtcttgaaattgtagggctgttcatcctgaggccagaggagtaattttatgttagaataaagattct

SEQ ID NO: 104174 - DNA, 80 bp, synthetic construct
  source 1..80: mol_type = other DNA
ctgtctgtgtttgcctgtagatgaaaattatttctgacattttaactaggcactctcagtctgggagttgtgaagtttta

SEQ ID NO: 104175 - DNA, 80 bp, synthetic construct
  source 1..80: mol_type = other DNA
ctcggttcactgcaacctccacctccttgggttcaagcgattctcctgcctcagcctcccgagtagctgtgattacaggc

SEQ ID NO: 104176 - DNA, 80 bp, synthetic construct; identical to SEQ ID NO: 20050
  source 1..80: mol_type = other DNA

SEQ ID NO: 104177 - DNA, 80 bp, synthetic construct
  source 1..80: mol_type = other DNA
ttgcctcagtgaaattaagcgctgttgtagagtccaaatatttataggtaaatgctatcctatatccttgcccataaaag

SEQ ID NO: 104178 - DNA, 80 bp, synthetic construct
  source 1..80: mol_type = other DNA
gttaagggaaatctacccaaccaccaaagagtatgataaatctcacggtattttatattttgttttagtagcccttatca

SEQ ID NO: 104179 - DNA, 80 bp, synthetic construct
  source 1..80: mol_type = other DNA
gctcactgcaagctccgcctcccgggttcacgctgttctcctgcctcagcctcccgagtagctgggactacaggcgcccg

SEQ ID NO: 104180 - DNA, 80 bp, synthetic construct; identical to SEQ ID NO: 20051
  source 1..80: mol_type = other DNA

SEQ ID NO: 104181 - DNA, 80 bp, synthetic construct
  source 1..80: mol_type = other DNA
taactgcagctgcgcgtcatgtcttaactggtaaacactgtaaagcccaataaataatgatgggtggactcttcctatct

SEQ ID NO: 104182 - DNA, 80 bp, synthetic construct
  source 1..80: mol_type = other DNA
gactgatgatacctcagatccagagaagacggtagaaagagtattggatatagcaaatgtgctttttcatcttgaacagg

SEQ ID NO: 104183 - DNA, 80 bp, synthetic construct; identical to SEQ ID NO: 20052
  source 1..80: mol_type = other DNA

SEQ ID NO: 104184 - DNA, 80 bp, synthetic construct
  source 1..80: mol_type = other DNA
gaaacattttcttttttgccacttgtttaaccttgccttttattaggtatatttttgagctaattttctctgaaatcagg

SEQ ID NO: 104185 - DNA, 80 bp, synthetic construct
  source 1..80: mol_type = other DNA
aaacattatcaatgggagggtcatatttttacagaagagatcatctggcttaggtaaaatatctgcaacacagagatata

SEQ ID NO: 104186 - DNA, 80 bp, synthetic construct
  source 1..80: mol_type = other DNA
attttatactaaatataaaataataataagatgccctatgccatctcaggaactttgccacctaaatgtatgtgtgtgtg

SEQ ID NO: 104187 - DNA, 80 bp, synthetic construct; identical to SEQ ID NO: 20053
  source 1..80: mol_type = other DNA

SEQ ID NO: 104188 - DNA, 80 bp, synthetic construct
  source 1..80: mol_type = other DNA
tctctattgtcatgcaatttatcactacacttgatgagattaaagtcactaggatacccttaagctgtatggctattaac

SEQ ID NO: 104189 - DNA, 80 bp, synthetic construct
  source 1..80: mol_type = other DNA
tatctccagaattatatatatatatgtttaagattattaaaggttaattaaatggctacatttctgacagcattgctcta

SEQ ID NO: 104190 - DNA, 80 bp, synthetic construct
  source 1..80: mol_type = other DNA
aatgaggttcacttttctaagtatccatttatgccttggatgtttatggagttccctgtcctagggcagccttatcccca

SEQ ID NO: 104191 - DNA, 80 bp, synthetic construct
  source 1..80: mol_type = other DNA
cttaatgtagatatgaagtaggtaatccctgtataagtcttaaggtaggaattatctagaaaaagtgggaggatcagagt

SEQ ID NO: 104192 - DNA, 80 bp, synthetic construct; identical to SEQ ID NO: 20054
  source 1..80: mol_type = other DNA

SEQ ID NO: 104193 - DNA, 80 bp, synthetic construct
  source 1..80: mol_type = other DNA
aagctaacacatcagcacatcaagacattcagacagggttacaaggtacatctttgtgttcgcctttggatcacatatct

SEQ ID NO: 104194 - DNA, 80 bp, synthetic construct
  source 1..80: mol_type = other DNA
ccctttttgttggatttttactgtatcttaaatgccttaggaacttaaaatatgtttgtcaactgtcacccatgctgatc

SEQ ID NO: 104195 - DNA, 80 bp, synthetic construct
  source 1..80: mol_type = other DNA
catcaagaagatgattgaagtggataattgtcaccacgtgtttattgatcatagagggggaagagcatcacagaaataag

SEQ ID NO: 104196 - DNA, 80 bp, synthetic construct; identical to SEQ ID NO: 20055
  source 1..80: mol_type = other DNA

SEQ ID NO: 104197 - DNA, 80 bp, synthetic construct
  source 1..80: mol_type = other DNA
attttaacatttttaccaaatttactcactcctaatactgtgttcacaaagcgttgtcttcttctctttatcctgctgta

SEQ ID NO: 104198 - DNA, 80 bp, synthetic construct
  source 1..80: mol_type = other DNA
gagaaggagataaaatgattttatatggaatgattttctatttctttgattttagaggtgacatagctttgaagtacaca

SEQ ID NO: 104199 - DNA, 80 bp, synthetic construct
  source 1..80: mol_type = other DNA
ggaattggaattccaaatatagattacttaagaggggcaactgtttaatactatatttttgaagatagtttggggtgtaa

SEQ ID NO: 104200 - DNA, 80 bp, synthetic construct; identical to SEQ ID NO: 20056
  source 1..80: mol_type = other DNA

SEQ ID NO: 104201 - DNA, 80 bp, synthetic construct
  source 1..80: mol_type = other DNA
gtaattattaaatgactcttactgaggaatatctgctcacatatgtgaggcaagagagagtcattaggagttctttcttt

SEQ ID NO: 104202 - DNA, 80 bp, synthetic construct
  source 1..80: mol_type = other DNA
ttgttcagattatttaatgggttgatgtatacagagtgcttagaagtgagctagtaggtttatgtcatgataaatgttag

SEQ ID NO: 104203 - DNA, 80 bp, synthetic construct; identical to SEQ ID NO: 20057
  source 1..80: mol_type = other DNA

SEQ ID NO: 104204 - DNA, 80 bp, synthetic construct
  source 1..80: mol_type = other DNA
atttgtctctttgattcagactttgagatcctgtactagttttgttccattttctttcttcagcacctagaacagtgact

SEQ ID NO: 104205 - DNA, 80 bp, synthetic construct
  source 1..80: mol_type = other DNA
gcatcctcctcaaatgtgctacttctcaattctctgactcaattatgctgtcaccttttggtcagatagaatattaacct

SEQ ID NO: 104206 - DNA, 80 bp, synthetic construct
  source 1..80: mol_type = other DNA
caatgatagactggataaagaaaaagtggcacatatacaccatggaatactatgcagccataaaaaaagaatgagttcat

SEQ ID NO: 104207 - DNA, 80 bp, synthetic construct
  source 1..80: mol_type = other DNA
gggggtgggggcaatgggagggagagtattaagacaaatacctaatgcatatggggcttaaaacctagaagatgggttga

SEQ ID NO: 104208 - DNA, 80 bp, synthetic construct; identical to SEQ ID NO: 20058
  source 1..80: mol_type = other DNA

SEQ ID NO: 104209 - DNA, 80 bp, synthetic construct
  source 1..80: mol_type = other DNA
aaagtattcaggcctcaacttattaaattagaatttcagtgagagcccagcatgtgtgctacttaaaagctacacaggtg

SEQ ID NO: 104210 - DNA, 80 bp, synthetic construct
  source 1..80: mol_type = other DNA
cccttcataaacctgtctaactgttacgtctcatgagtccttaacccaatttgttatcataaagctcagctttccatcct

SEQ ID NO: 104211 - DNA, 80 bp, synthetic construct; identical to SEQ ID NO: 20059
  source 1..80: mol_type = other DNA

SEQ ID NO: 104212 - DNA, 80 bp, synthetic construct
  source 1..80: mol_type = other DNA
ttttggaatcctcagggccatccatttgttttttaatgtttgcttggacagagactaagtcctctattgacactgattac

SEQ ID NO: 104213 - DNA, 80 bp, synthetic construct
  source 1..80: mol_type = other DNA
gtcacttgaccaatgttacaaagcttggaaatgactgagccaggattgaaatgcaagtcactgtgcgctatgtttgctgc

SEQ ID NO: 104214 - DNA, 80 bp, synthetic construct
  source 1..80: mol_type = other DNA
cgggctgtcaatctctttcttcagggatatgaaaagtcttggattgaaacagaagaacattactttgaagataaactgat

SEQ ID NO: 104215 - DNA, 80 bp, synthetic construct
  source 1..80: mol_type = other DNA
cattcaatgcttatgggaaaatgtgctcttgtcatttccaagagatctcatcaacatcaaggggttgagaatttaaaatg

SEQ ID NO: 104216 - DNA, 80 bp, synthetic construct; identical to SEQ ID NO: 20060
  source 1..80: mol_type = other DNA

SEQ ID NO: 104217 - DNA, 80 bp, synthetic construct
  source 1..80: mol_type = other DNA
acaaaatttacaagccatctcaaaacttggcagactagtcagaggcttcatgattcccaagataaagacatcttgtgtaa

SEQ ID NO: 104218 - DNA, 80 bp, synthetic construct
  source 1..80: mol_type = other DNA
ttatccacattaaggcttaattacaggaaagaacaccattcatgtacagagaaaattagtttccatggctaagtcagtgg

SEQ ID NO: 104219 - DNA, 80 bp, synthetic construct; identical to SEQ ID NO: 20061
  source 1..80: mol_type = other DNA

SEQ ID NO: 104220 - DNA, 80 bp, synthetic construct
  source 1..80: mol_type = other DNA
atctctgttttgagctgcataattttacaatggtaatgtaacagatatctagcatattatattacatttatatatgttat

SEQ ID NO: 104221 - DNA, 80 bp, synthetic construct
  source 1..80: mol_type = other DNA
tcgcattccttttattcttcattgctgtccttcacagtgcttttggatttgagtgaacatttttttttaatgtgacattt

SEQ ID NO: 104222 - DNA, 80 bp, synthetic construct
  source 1..80: mol_type = other DNA
gagcaaataaagacacccgtgtctgagtattctgtgccatgtgttcatgttttaagttcatcttgttgttgttaggagag

SEQ ID NO: 104223 - DNA, 80 bp, synthetic construct
  source 1..80: mol_type = other DNA
tttatcacaaacaaactttataaataaaacaaaagaaccaaagcaaattccagtgccgcaagtgtatggagaccgatggt

SEQ ID NO: 104224 - DNA, 80 bp, synthetic construct; identical to SEQ ID NO: 20062
  source 1..80: mol_type = other DNA

SEQ ID NO: 104225 - DNA, 80 bp, synthetic construct
  source 1..80: mol_type = other DNA
cctttcccattctctgcagaatttgggatgtaatttaattaaaaactcatatccacatgaatctcctcagaagagttcat

SEQ ID NO: 104226 - DNA, 80 bp, synthetic construct
  source 1..80: mol_type = other DNA
taagcatagagcaactctctctctggcattgtcaggtaatgaggtatttctcataagtgaatttttctcatggctgaagt

SEQ ID NO: 104227 - DNA, 80 bp, synthetic construct
  source 1..80: mol_type = other DNA
attgtcatatcataatttggggactctttccatcaaatgtcaaatttcacttctgtcaaaagcccccacctcatttaagt

SEQ ID NO: 104228 - DNA, 80 bp, synthetic construct; identical to SEQ ID NO: 20063
  source 1..80: mol_type = other DNA

SEQ ID NO: 104229 - DNA, 80 bp, synthetic construct
  source 1..80: mol_type = other DNA
cttctgcttaaacactgatgttttcttcttgctttccccagcaaactggaggaagattttttatatatggcctatgcaga

SEQ ID NO: 104230 - DNA, 80 bp, synthetic construct
  source 1..80: mol_type = other DNA
ttgtagcatgaatctccgttctaaattccatggcaggtcatcattgtttcctacttaaacattttatttatgaggagcca

SEQ ID NO: 104231 - DNA, 80 bp, synthetic construct
  source 1..80: mol_type = other DNA
ggggaagataaagtttaagcaaatggttgtagaaaaaccctgatgaacttaatggcagagaaatgtatccctccattttt

SEQ ID NO: 104232 - DNA, 80 bp, synthetic construct; identical to SEQ ID NO: 20064
  source 1..80: mol_type = other DNA

SEQ ID NO: 104233 - DNA, 80 bp, synthetic construct
  source 1..80: mol_type = other DNA
tctgcttaaggaagtctttggctgttgaaccatgagttggccatgcaaaaatagtacagcttagtatttactgagtgttt

SEQ ID NO: 104234 - DNA, 80 bp, synthetic construct
  source 1..80: mol_type = other DNA
cgttaaagatgcctgtgagacatctaagtggaggtgtcaaacatgcaattagacattcatgtctgacattcagtatctca

SEQ ID NO: 104235 - DNA, 80 bp, synthetic construct
  source 1..80: mol_type = other DNA
tcataaaaaagttggagagaaccttaagtgtgagctaacataggagctagaagctataggacttattgtgtggtcaccaa

SEQ ID NO: 104236 - DNA, 80 bp, synthetic construct
  source 1..80: mol_type = other DNA
tggggacatgctgtagtgtgagaaagtaagtagtgattcagatgtgaacagaaatagtatagttgtttcttcattgcaaa

SEQ ID NO: 104237 - DNA, 80 bp, synthetic construct; identical to SEQ ID NO: 20065
  source 1..80: mol_type = other DNA

SEQ ID NO: 104238 - DNA, 80 bp, synthetic construct
  source 1..80: mol_type = other DNA
tccaagaatgctcaaatccctgactaatggcatagtatttgcatgtaacctacacacatcctcctgtatacttagatcat

SEQ ID NO: 104239 - DNA, 80 bp, synthetic construct
  source 1..80: mol_type = other DNA
ttggttgactccatggattcagaaccaatggagggccaactgtatatttatagaaacataaaactgtatgtttaaagtaa

SEQ ID NO: 104240 - DNA, 80 bp, synthetic construct; identical to SEQ ID NO: 20066
  source 1..80: mol_type = other DNA

SEQ ID NO: 104241 - DNA, 80 bp, synthetic construct
  source 1..80: mol_type = other DNA
ccagctcctcaggaggctgaggcaggagaattgcttgaatctgggaggcggaaagttgcagtgagccgtgattgcaccac

SEQ ID NO: 104242 - DNA, 80 bp, synthetic construct
  source 1..80: mol_type = other DNA
aaaaggacagtcacctgctgacacctaagtgtttgatgaagtctataaaggaaggctagaggagagagagaagcaaagga

SEQ ID NO: 104243 - DNA, 80 bp, synthetic construct
  source 1..80: mol_type = other DNA
gaggacaactagcaattctcagaaccaaatgcaaattctgagaagccaggaagttagattcatcaagggtgaagatttct

SEQ ID NO: 104244 - DNA, 80 bp, synthetic construct; identical to SEQ ID NO: 20067
  source 1..80: mol_type = other DNA

SEQ ID NO: 104245 - DNA, 80 bp, synthetic construct
  source 1..80: mol_type = other DNA
ttccccttcataattaaataatcatattcattttattgtttaatgtaactcagggatgtccagcttgcaccacgcagttt

SEQ ID NO: 104246 - DNA, 80 bp, synthetic construct
  source 1..80: mol_type = other DNA
tgccttaggatcttatacatttgccatcaatggcaagaatgcattaaattttcagccaggtcatgtcagctatcctgtat

SEQ ID NO: 104247 - DNA, 80 bp, synthetic construct
  source 1..80: mol_type = other DNA
tctctgtttatctcagttggtagtgtgcagctgaaatttttataccctttcccagactggttaacctactttgttttcaa

SEQ ID NO: 104248 - DNA, 80 bp, synthetic construct
  source 1..80: mol_type = other DNA
aagatggatgagtattcctcagtgatttgcttgataacccattttagactattgttgattattaatatcgaacttcctag

SEQ ID NO: 104249 - DNA, 80 bp, synthetic construct; identical to SEQ ID NO: 20068
  source 1..80: mol_type = other DNA

SEQ ID NO: 104250 - DNA, 80 bp, synthetic construct
  source 1..80: mol_type = other DNA
ctgacaagaaacaacctagagaatttacgtgttatcctatgggcttctcattaacctataccctgtctccccacacaaag

SEQ ID NO: 104251 - DNA, 80 bp, synthetic construct
  source 1..80: mol_type = other DNA
tttaaaagggcagtaggctgtgtgtaatattttgggctctacttattgaattaatagtgttttctaagattcctccatac

SEQ ID NO: 104252 - DNA, 80 bp, synthetic construct
  source 1..80: mol_type = other DNA
tttcacctatcttacaagagctacagggtgtacccattttcaaataaaggaacaaatgtcatactgttttccaaagttac

SEQ ID NO: 104253 - DNA, 80 bp, synthetic construct; identical to SEQ ID NO: 20069
  source 1..80: mol_type = other DNA

SEQ ID NO: 104254 - DNA, 80 bp, synthetic construct
  source 1..80: mol_type = other DNA
cccctactcctatcatatatacttcctctttaaaaaatcctatggagaacttcagtgcatcccatcggtttgctgttgcc

SEQ ID NO: 104255 - DNA, 80 bp, synthetic construct
  source 1..80: mol_type = other DNA
cacaaattaaacactcaacaatgttgctgctgttttgagtttccagctaagggaactctttcctcctagttctcctcctt

SEQ ID NO: 104256 - DNA, 80 bp, synthetic construct; identical to SEQ ID NO: 20070
  source 1..80: mol_type = other DNA

SEQ ID NO: 104257 - DNA, 80 bp, synthetic construct
  source 1..80: mol_type = other DNA
tgaagagccctcattactgtgttatgtattcgtgctgccagttttgaattctgttgtggatacctgaatgatctgacata

SEQ ID NO: 104258 - DNA, 80 bp, synthetic construct
  source 1..80: mol_type = other DNA
attctgatccagaaagccaaatcctgctacaggactgtctaatataacttcccatttgcttagcattatcatctatgtca

SEQ ID NO: 104259 - DNA, 80 bp, synthetic construct
  source 1..80: mol_type = other DNA
ataggtttggtgaatttgtcagatacagtctgtacaccaagtaaattcaggtttaatagtttttaaaaatcacaaatttt

SEQ ID NO: 104260 - DNA, 80 bp, synthetic construct
  source 1..80: mol_type = other DNA
tatggcttaaaaacatatcattataatcccaaataacaatttgtctgaatgtattctttatctcaatccttgtgtctctc

SEQ ID NO: 104261 - DNA, 80 bp, synthetic construct; identical to SEQ ID NO: 20071
  source 1..80: mol_type = other DNA

SEQ ID NO: 104262 - DNA, 80 bp, synthetic construct
  source 1..80: mol_type = other DNA
tgggagacagagcagcagaaactcaaaggagaacatttcctgctttctgagggaatcattaacatctttgcttttgtgat

SEQ ID NO: 104263 - DNA, 80 bp, synthetic construct
  source 1..80: mol_type = other DNA
aatgaatgaaagaatatgacaaaccttttagaatttatcacggagtgagtggaagggtcacattgtttaccttccctccc

SEQ ID NO: 104264 - DNA, 80 bp, synthetic construct; identical to SEQ ID NO: 20072
  source 1..80: mol_type = other DNA

SEQ ID NO: 104265 - DNA, 80 bp, synthetic construct
  source 1..80: mol_type = other DNA
caatcttggctcactgcagcctccgcctcctgggttcaagcaattctcctgcctcagcctcccgagtagctggcattaca

SEQ ID NO: 104266 - DNA, 80 bp, synthetic construct
  source 1..80: mol_type = other DNA
attttaactaatggtcattatatttgcctgtattcgtgcattgcaatggcagcataaaaaaaagagaaaatccttttaag

SEQ ID NO: 104267 - DNA, 80 bp, synthetic construct
  source 1..80: mol_type = other DNA
aagcactatatataattttcatgtcatgaattcattgattatgtcatctaagcattctatcttacatgtgtttaaacaag

SEQ ID NO: 104268 - DNA, 80 bp, synthetic construct; identical to SEQ ID NO: 20073
  source 1..80: mol_type = other DNA

SEQ ID NO: 104269 - DNA, 80 bp, synthetic construct
  source 1..80: mol_type = other DNA
aaataatataatgaagcacatatgttcagaatgagtgttcctgagaaccctcagagatgagacggcttcaaattggtctc

SEQ ID NO: 104270 - DNA, 80 bp, synthetic construct
  source 1..80: mol_type = other DNA
taaagatttggccttaaagacttctgcccaattagatcactcattccatgtacatatgcagatagtggcacacaacgcag

SEQ ID NO: 104271 - DNA, 80 bp, synthetic construct
  source 1..80: mol_type = other DNA
cttagcccaaaggaaagttaatagtattttccccctttgcttatactgtactttcgttttttatgaggaaaagctagttg

SEQ ID NO: 104272 - DNA, 80 bp, synthetic construct; identical to SEQ ID NO: 20074
  source 1..80: mol_type = other DNA

SEQ ID NO: 104273 - DNA, 80 bp, synthetic construct
  source 1..80: mol_type = other DNA
tatgttttctattctcaaagtcatctttattgataagaaagtgaggtcagtttagaatgagctgtgagcagcagataata

SEQ ID NO: 104274 - DNA, 80 bp, synthetic construct
  source 1..80: mol_type = other DNA
ctcatccttccttaaggtcacaggatcccaacgcagcaaggtaaaactatatatatgtgtgtatttgtctgggtctgagt

SEQ ID NO: 104275 - DNA, 80 bp, synthetic construct
  source 1..80: mol_type = other DNA
tgactcataatttgaaattttatcctccagctaactttgagctgcatactgtgctgggataaaggagtccagccctttgg

SEQ ID NO: 104276 - DNA, 80 bp, synthetic construct; identical to SEQ ID NO: 20075
  source 1..80: mol_type = other DNA

SEQ ID NO: 104277 - DNA, 80 bp, synthetic construct
  source 1..80: mol_type = other DNA
ttcataaggctatatggtaggaaaatcaatcataaacattctgtgaagatgatacctataaagactttagttttgtttgt

SEQ ID NO: 104278 - DNA, 80 bp, synthetic construct
  source 1..80: mol_type = other DNA
tggccaatgtggtgaaacctcatctctactaaaaatacaaaaattagccgggcgtggtagtgcacgcctgtaatcccagc

SEQ ID NO: 104279 - DNA, 80 bp, synthetic construct
  source 1..80: mol_type = other DNA
tttgccttctttttttaaaaaaaaaaaaagtgaaatatttgctgccaaaatgaattttagactgtcttgaagaaactatt

SEQ ID NO: 104280 - DNA, 80 bp, synthetic construct
  source 1..80: mol_type = other DNA
gcgccaccacgcccggctaagctaattttttgtatttttagtagagacggggtttcaccatgttggccacaatggtcttt

SEQ ID NO: 104281 - DNA, 80 bp, synthetic construct; identical to SEQ ID NO: 20076
  source 1..80: mol_type = other DNA

SEQ ID NO: 104282 - DNA, 80 bp, synthetic construct
  source 1..80: mol_type = other DNA
aagtagcataaaagttaatgcctcaagaatgtgttgatagttgtatgatggggctggatggcagagaaggtgttgctagc

SEQ ID NO: 104283 - DNA, 80 bp, synthetic construct
  source 1..80: mol_type = other DNA
caagtgatggcatcttaatatttagacactaggattcaggccagactaaggacaagaagtcaaatgacatatggagcatg

SEQ ID NO: 104284 - DNA, 80 bp, synthetic construct; identical to SEQ ID NO: 20077
  source 1..80: mol_type = other DNA

SEQ ID NO: 104285 - DNA, 80 bp, synthetic construct
  source 1..80: mol_type = other DNA
ttacaaagctgagaaacagagatatatataattaattccctataaagatactcttctctgaggttgactatgtgacacca

SEQ ID NO: 104286 - DNA, 80 bp, synthetic construct
  source 1..80: mol_type = other DNA
acacattatatcaaataaatttggaaataacataaagtgtgtggtaattgaattctatccctatacctggttaattatta

SEQ ID NO: 104287 - DNA, 80 bp, synthetic construct
  source 1..80: mol_type = other DNA
tgcagtaaagctcaaaaaacatggaaaacaaggaaagaggaatgatttgccagctcttttcttcttccatcatatatata

SEQ ID NO: 104288 - DNA, 80 bp, synthetic construct
  source 1..80: mol_type = other DNA
ctacttctctatcaaaagcattaaaaagaacagttaaatcttataaagaggccgatgttaattgaaagggaagaaatgtt

SEQ ID NO: 104289 - DNA, 80 bp, synthetic construct; identical to SEQ ID NO: 20078
  source 1..80: mol_type = other DNA

SEQ ID NO: 104290 - DNA, 80 bp, synthetic construct
  source 1..80: mol_type = other DNA
gacagtgaagcttagataagcaagaggaatggaatgttaacttgtcttccagccatctttctcaaatactgggcaagctg

SEQ ID NO: 104291 - DNA, 80 bp, synthetic construct
  source 1..80: mol_type = other DNA
gaaaccagcatattctctcagatggatctgagacacaaataaaatattgtcatacctgctaacatactcaaaccaatacc

SEQ ID NO: 104292 - DNA, 80 bp, synthetic construct; identical to SEQ ID NO: 20079
  source 1..80: mol_type = other DNA

SEQ ID NO: 104293 - DNA, 80 bp, synthetic construct
  source 1..80: mol_type = other DNA
ggaggtatatggtatccaaaatatggactaaagcattaagagttgcttttcatgctattgaatcatagaggggaaagagg

SEQ ID NO: 104294 - DNA, 80 bp, synthetic construct
  source 1..80: mol_type = other DNA
ttcctggaaaacacaggcaaaagcttacgtgctaacactttattgggggaaggggtgttaaaatcccagggaatgaagag

SEQ ID NO: 104295 - DNA, 80 bp, synthetic construct
  source 1..80: mol_type = other DNA
cggggaaggaggataggcactttatatgcaggttccttacatctcctgtcacttactggtcacagagtgttaatttcatc

SEQ ID NO: 104296 - DNA, 80 bp, synthetic construct; identical to SEQ ID NO: 20080
  source 1..80: mol_type = other DNA

SEQ ID NO: 104297 - DNA, 80 bp, synthetic construct
  source 1..80: mol_type = other DNA
tccacatccttggattcagccaactacagatttaaatattcgaaaaaatatttgcttctgtagccaacaagtacagactt

SEQ ID NO: 104298 - DNA, 80 bp, synthetic construct
  source 1..80: mol_type = other DNA
cccccacagatactaggagacaaacatgtattgaagcagcatatatttgtgcacttttcatgtgcacagtaatgtaactt

SEQ ID NO: 104299 - DNA, 80 bp, synthetic construct
  source 1..80: mol_type = other DNA
aatcccagcttgaacttctagctgtgtgagcggaagcctcaatttttctatctataaagtgtggctaattatagtatcta

SEQ ID NO: 104300 - DNA, 80 bp, synthetic construct; identical to SEQ ID NO: 20081
  source 1..80: mol_type = other DNA

SEQ ID NO: 104301 - DNA, 80 bp, synthetic construct
  source 1..80: mol_type = other DNA
ttcaactagatgttctcagatgtcaaatctacccttaacagttgtgtggtttgctatccaggcataaattctcttcattt

SEQ ID NO: 104302 - DNA, 80 bp, synthetic construct
  source 1..80: mol_type = other DNA
caggaatgtgacacaaaaatgttttatagaaaataatgtcagccaggtgcagtgtatcgtggctgtaatcccagcacttt

SEQ ID NO: 104303 - DNA, 80 bp, synthetic construct
  source 1..80: mol_type = other DNA
tgaacccaggaggcggaggttgcagtgagccaagattacaccattgcactccaggctgggcagcagagtgagactccatc

SEQ ID NO: 104304 - DNA, 80 bp, synthetic construct; identical to SEQ ID NO: 20082
  source 1..80: mol_type = other DNA

SEQ ID NO: 104305 - DNA, 80 bp, synthetic construct
  source 1..80: mol_type = other DNA
ataaatatcaatatcattaaatatagtatgtaatatataaaacattgatattaggtatattaaatataatactatttaaa

SEQ ID NO: 104306 - DNA, 80 bp, synthetic construct
  source 1..80: mol_type = other DNA
atacaatagagtccagttgtgcagatgctacctgaagatggattagcataaaatggctaccaagtatctggaagaattga

SEQ ID NO: 104307 - DNA, 80 bp, synthetic construct
  source 1..80: mol_type = other DNA
caagagttgatctggggtagggttaataaccattcatgaagatctagaattacaaagactagagcttctatagttgtgag

SEQ ID NO: 104308 - DNA, 80 bp, synthetic construct; identical to SEQ ID NO: 20083
  source 1..80: mol_type = other DNA

SEQ ID NO: 104309 - DNA, 80 bp, synthetic construct
  source 1..80: mol_type = other DNA
gattttagagtttctcattcttttctttccttgttataccttgttaattaagctttcagtggtatagtgtaaattgtgtc

SEQ ID NO: 104310 - DNA, 80 bp, synthetic construct
  source 1..80: mol_type = other DNA
tacacagtatatctaacgtcaaagcctctagtgcattaactgaattacttgaccctggtttagtgtttcttttgtctctg

SEQ ID NO: 104311 - DNA, 80 bp, synthetic construct
  source 1..80: mol_type = other DNA
attaaatgagctaaagcccacaatttgattattatttgtatatgtataattctgaagacctctttaaacatgaactgaaa

SEQ ID NO: 104312 - DNA, 80 bp, synthetic construct; identical to SEQ ID NO: 20084
  source 1..80: mol_type = other DNA

SEQ ID NO: 104313 - DNA, 80 bp, synthetic construct
  source 1..80: mol_type = other DNA
aagcagtcctcccacttcagcctcccaaagtgctgaggttacaggcatgagccaccatgcctggctcatttatttaatta

SEQ ID NO: 104314 - DNA, 80 bp, synthetic construct
  source 1..80: mol_type = other DNA
ctcttatccatacttttgacttcccttagtctgagttgacctgtttgtgctgcaaaccaaattattagtacaatttcact

SEQ ID NO: 104315 - DNA, 80 bp, synthetic construct
  source 1..80: mol_type = other DNA
aaatttaaggagttttgttcctggatatttctattctcttataacttgctaccacctacagtttctgaggaaaatattat

SEQ ID NO: 104316 - DNA, 80 bp, synthetic construct; identical to SEQ ID NO: 20085
  source 1..80: mol_type = other DNA

SEQ ID NO: 104317 - DNA, 80 bp, synthetic construct
  source 1..80: mol_type = other DNA
cacataagacaagttgtcgaagaactaaatatagttgtttctcttcaagcctttctacttgtttccccaagtgttaaaag

SEQ ID NO: 104318 - DNA, 80 bp, synthetic construct
  source 1..80: mol_type = other DNA
gtctgaaatatgaccatattcgaccttggaaaaacctcctaacaagcttattaggatatgcactgataattcttggttgc

SEQ ID NO: 104319 - DNA, 80 bp, synthetic construct
  source 1..80: mol_type = other DNA
ctgctgtgtcagagaactctattcttgaaaaggtgccttcaaggtgttattttcctgagtaagatgcttataaaagatct

SEQ ID NO: 104320 - DNA, 80 bp, synthetic construct
  source 1..80: mol_type = other DNA
aagctgttctcaaagggcaaagtactggaaagaaataatattaaagaatcctgaagggagagcttccaatttcagttcaa

SEQ ID NO: 104321 - DNA, 80 bp, synthetic construct; identical to SEQ ID NO: 20086
  source 1..80: mol_type = other DNA

SEQ ID NO: 104322 - DNA, 80 bp, synthetic construct
  source 1..80: mol_type = other DNA
tgttgttttgttctgttttttctcaagagtgtgtggcatgttgccatcttccatcttctgtgagtttcctgatgactgtc

SEQ ID NO: 104323 - DNA, 80 bp, synthetic construct
  source 1..80: mol_type = other DNA
ttccacatggagctctggcaatgggaggaacataaaagattgttgggtctaaaaggaagaatcagatgttgctcatcagt

SEQ ID NO: 104324 - DNA, 80 bp, synthetic construct
  source 1..80: mol_type = other DNA
cacaggaagaggtttaaacatgaaggcaaaccttatagatgttagcatggctacatataaagcaaagctgcctctttttt

SEQ ID NO: 104325 - DNA, 80 bp, synthetic construct; identical to SEQ ID NO: 20087
  source 1..80: mol_type = other DNA

SEQ ID NO: 104326 - DNA, 80 bp, synthetic construct
  source 1..80: mol_type = other DNA
ccatcttccagtgtctattttctgtattttggatggaaagtttatggcagcaaagctgtcattctggctacctctgctgc

SEQ ID NO: 104327 - DNA, 80 bp, synthetic construct
  source 1..80: mol_type = other DNA
gtcatagggctctatgcaactttcattctgcaacttatactgcttagttccttctcaattctccagtgaactggattgct

SEQ ID NO: 104328 - DNA, 80 bp, synthetic construct; identical to SEQ ID NO: 20088
  source 1..80: mol_type = other DNA

SEQ ID NO: 104329 - DNA, 80 bp, synthetic construct
  source 1..80: mol_type = other DNA
cttatgcacaaatgtataaatcagaaagtgcaagtttcattgatgaagtacagtacttcaaaactgtgatacaggctttg

SEQ ID NO: 104330 - DNA, 80 bp, synthetic construct
  source 1..80: mol_type = other DNA
ttgtcatagagcccatacatgaagagatgactaaaaatatggtctgtagaaatctgttgtgcttactgataccctcaaca

SEQ ID NO: 104331 - DNA, 80 bp, synthetic construct
  source 1..80: mol_type = other DNA
cttcagatttcctcgttgctctcaaggtcctccctcatttcaattccactgactcatttagtcctggggtttctggttca

SEQ ID NO: 104332 - DNA, 80 bp, synthetic construct; identical to SEQ ID NO: 20089
  source 1..80: mol_type = other DNA

SEQ ID NO: 104333 - DNA, 80 bp, synthetic construct
  source 1..80: mol_type = other DNA
tttatttacacacactttgtttacacacataggtggcaagctgtaatttttttatgtaatttatggtattttgccatagt

SEQ ID NO: 104334 - DNA, 80 bp, synthetic construct
  source 1..80: mol_type = other DNA
tggaaaagtaatggtggtacattctgttattaggtacccttgtccttgaatagaagattatttatatttctaggataaat

SEQ ID NO: 104335 - DNA, 80 bp, synthetic construct
  source 1..80: mol_type = other DNA
ctgttgagggaagagggagagaaattttctttaaagaaacttttaagtagctcatacttattttaatgtttattaaacac

SEQ ID NO: 104336 - DNA, 80 bp, synthetic construct
  source 1..80: mol_type = other DNA
cattttttggaacataagtcagtctccctatgccattaaacagattgcctgggggggcataataataattttaaaagtgc

SEQ ID NO: 104337 - DNA, 80 bp, synthetic construct; identical to SEQ ID NO: 20090
  source 1..80: mol_type = other DNA

SEQ ID NO: 104338 - DNA, 80 bp, synthetic construct
  source 1..80: mol_type = other DNA
aaaacatcaagtgtgaccttttatcatgtcaaatgaattctggtgctgaggtatgaaccactctctcaccatgcgtttac

SEQ ID NO: 104339 - DNA, 80 bp, synthetic construct
  source 1..80: mol_type = other DNA
gaagaccctcattacttagtatgtatattcagaagtccttagatccagagacaggagtgagagatcctgtaatgtatact

SEQ ID NO: 104340 - DNA, 80 bp, synthetic construct
  source 1..80: mol_type = other DNA
atccctttgtttgaaaaaaaacaatgattgtttcattttttatttgaccaaaagttatcacaccccccgtaaatggctat

SEQ ID NO: 104341 - DNA, 80 bp, synthetic construct; identical to SEQ ID NO: 20091
  source 1..80: mol_type = other DNA

SEQ ID NO: 104342 - DNA, 80 bp, synthetic construct
  source 1..80: mol_type = other DNA
catgtcagaaatagctgtttcgttatgctatgtaacagtaagctaacaagacaaagcattgctttagcgtttttttacat

SEQ ID NO: 104343 - DNA, 80 bp, synthetic construct
  source 1..80: mol_type = other DNA
ctgaatttccgtctatagcattagcatatggcagtcacaactctcagattgtaatgctgttcggggttttttgttttgtt

SEQ ID NO: 104344 - DNA, 80 bp, synthetic construct
  source 1..80: mol_type = other DNA
ttttagtagagacggggtttcactatgttggtcaggctggtctcaaactcctgacctcatgatttgcccacctcagcctc

SEQ ID NO: 104345 - DNA, 80 bp, synthetic construct; identical to SEQ ID NO: 20092
  source 1..80: mol_type = other DNA

SEQ ID NO: 104346 - DNA, 80 bp, synthetic construct
  source 1..80: mol_type = other DNA
cagtggccacgtggtttctataattcccatagaaaatgcttgactacctcaaggagaaaaaggatgtgggcttctttcag

SEQ ID NO: 104347 - DNA, 80 bp, synthetic construct
  source 1..80: mol_type = other DNA
agaatagttaatgattaacaacactttaaagtgggataatcggcagtgtcttgttttctatcttgttttaaggggttggt

SEQ ID NO: 104348 - DNA, 80 bp, synthetic construct; identical to SEQ ID NO: 20093
  source 1..80: mol_type = other DNA

SEQ ID NO: 104349 - DNA, 80 bp, synthetic construct
  source 1..80: mol_type = other DNA
gccttccccgtgtttaaatagggatcttggagaattagcgtatattctgcatacttgaaaatgagttgtgtatgcttttt

SEQ ID NO: 104350 - DNA, 80 bp, synthetic construct
  source 1..80: mol_type = other DNA
tcattcagacagcatttgactaaggaatctgacacacatttaatgtaagaagctattccaactgcaaaaacataattatt

SEQ ID NO: 104351 - DNA, 80 bp, synthetic construct
  source 1..80: mol_type = other DNA
gtctgccactaagaaaatacggttggtacgcaatgaatggagacatgttttcagtgtacgttaacatttgcttcatcttc

SEQ ID NO: 104352 - DNA, 80 bp, synthetic construct; identical to SEQ ID NO: 20094
  source 1..80: mol_type = other DNA

SEQ ID NO: 104353 - DNA, 80 bp, synthetic construct
  source 1..80: mol_type = other DNA
cttgtgtgccagccccattgccagctgcctttccccttattgggttttcaatgaggaataatggttgaatgaaggatcaa

SEQ ID NO: 104354 - DNA, 80 bp, synthetic construct
  source 1..80: mol_type = other DNA
ctattccctcctcttcccttccagcacagtgatcctcaaatccatacatgtttgcaagtctagattgatgaaagaaatta

SEQ ID NO: 104355 - DNA, 80 bp, synthetic construct
  source 1..80: mol_type = other DNA
agatgctggtataaactagaaagtttagcatacaatgcatttaaagcagaaataacctttgctgccctttcattttagca

SEQ ID NO: 104356 - DNA, 80 bp, synthetic construct
  source 1..80: mol_type = other DNA
ggaacattgggtcttttattggactaatcttatttcaaaaaataattttttctcccatctgccatttgtagtctatgttt

SEQ ID NO: 104357 - DNA, 80 bp, synthetic construct; identical to SEQ ID NO: 20095
  source 1..80: mol_type = other DNA

SEQ ID NO: 104358 - DNA, 80 bp, synthetic construct
  source 1..80: mol_type = other DNA
gcctatcacctgcctacctccagcatctctccaaagtcctaagcaattttcagctataaaatttctaaaaatgaatgaag

SEQ ID NO: 104359 - DNA, 80 bp, synthetic construct
  source 1..80: mol_type = other DNA
tattttcctcagcctcctttccttcgtcaggcggatatgggttggaataacattttcgagtcccaagtcagaaagaactt

SEQ ID NO: 104360 - DNA, 80 bp, synthetic construct; identical to SEQ ID NO: 20096
  source 1..80: mol_type = other DNA

SEQ ID NO: 104361 - DNA, 80 bp, synthetic construct
  source 1..80: mol_type = other DNA
tttgctcctttatttgttgttagctttgtgtacagacttgatagtgacaatttccgtgcattcttttttgttgtagactg

SEQ ID NO: 104362 - DNA, 80 bp, synthetic construct
  source 1..80: mol_type = other DNA
gattggttttgttgcttttcagttaaaaacctttctggtgggcccagcgtctgcaactgttgtgtcaatgaatgatccta

SEQ ID NO: 104363 - DNA, 80 bp, synthetic construct
  source 1..80: mol_type = other DNA
attgggaggcctactgagtttttcctctattcctttgaaaatctgacagattacaaatcatttaacatcaaaactaattt

SEQ ID NO: 104364 - DNA, 80 bp, synthetic construct
  source 1..80: mol_type = other DNA
cgccaacaaggcttccaagattaaattgtgctttctgaatacatgctattgccttaatcaagagacctattaggagcata

SEQ ID NO: 104365 - DNA, 80 bp, synthetic construct; identical to SEQ ID NO: 20097
  source 1..80: mol_type = other DNA

SEQ ID NO: 104366 - DNA, 80 bp, synthetic construct
  source 1..80: mol_type = other DNA
tatgaccataaattatatagccatggaaaacgtataagctcaaatgcatgaacttttgatacccgcaaccctccaatgag

SEQ ID NO: 104367 - DNA, 80 bp, synthetic construct
  source 1..80: mol_type = other DNA
actgtttaatttacagatcccacgagtgaagtcacttccctcccatctgttcatattcttcaggggcttacttcatgtct

SEQ ID NO: 104368 - DNA, 80 bp, synthetic construct
  source 1..80: mol_type = other DNA
gttcaagcgattctcctgcctcagcctctcaagtagctgggattacaggcctgccaccacaattggctaatttttgtatt

SEQ ID NO: 104369 - DNA, 80 bp, synthetic construct; identical to SEQ ID NO: 20098
  source 1..80: mol_type = other DNA

SEQ ID NO: 104370 - DNA, 80 bp, synthetic construct
  source 1..80: mol_type = other DNA
tctgtctcctttttatactaagtttctctcatttctgtgaaagcctgagcctcccagttttttttttttaaaggttcttc

SEQ ID NO: 104371 - DNA, 80 bp, synthetic construct
  source 1..80: mol_type = other DNA
agaaccattaaccccattaccaaatcattatgacattgaaagtgcaatttttctgctttcaaaattcttcttggaatata

SEQ ID NO: 104372 - DNA, 80 bp, synthetic construct; identical to SEQ ID NO: 20099
  source 1..80: mol_type = other DNA

SEQ ID NO: 104373 - DNA, 80 bp, synthetic construct
  source 1..80: mol_type = other DNA
tactttcacaagtgtagtttagtattctgtgtaccttattctgccattcttgtgggtaaattttctcttcaaggaaaact

SEQ ID NO: 104374 - DNA, 80 bp, synthetic construct
  source 1..80: mol_type = other DNA
acaaataaattcagaacaatgctttatgcatataaaggaatttaggtggaagtacttagcggctgggatgttgcggggct

SEQ ID NO: 104375 - DNA, 80 bp, synthetic construct
  source 1..80: mol_type = other DNA
ctaagctgttatgaaggaaaatgatcagactagaggatggaaacatagtacctgggaggccacgaaggaccttctctgcc

SEQ ID NO: 104376 - DNA, 80 bp, synthetic construct
  source 1..80: mol_type = other DNA
tttcccatttctcagtcatgctactaaatagaaattgactcctccaaagatagtgaccagcattattatttccttcatgg

SEQ ID NO: 104377 - DNA, 80 bp, synthetic construct; identical to SEQ ID NO: 20100
  source 1..80: mol_type = other DNA

SEQ ID NO: 104378 - DNA, 80 bp, synthetic construct
  source 1..80: mol_type = other DNA
tttcacatagtggtcattttcgttgtcttggcatcggaaataggaatgcattgtatacaacgctgtcagactgttaacta

SEQ ID NO: 104379 - DNA, 80 bp, synthetic construct
  source 1..80: mol_type = other DNA
tcgattctcccaacagtcctatgaaatgaggagttgaggagtttgttcatctctatatcaacatgatgaaacgaaggctc

SEQ ID NO: 104380 - DNA, 80 bp, synthetic construct; identical to SEQ ID NO: 20101
  source 1..80: mol_type = other DNA

SEQ ID NO: 104381 - DNA, 80 bp, synthetic construct
  source 1..80: mol_type = other DNA
cctgaattgaaatgatgagataacatatctagcacaatgcctagcacactgtagtcactaactaaatattaactgtaagc

SEQ ID NO: 104382 - DNA, 80 bp, synthetic construct
  source 1..80: mol_type = other DNA
tttaaaatatctgtagcatttttcagttttggcaagatgcagaatcgatcttaaggtcccctcaagatccacaatcagca

SEQ ID NO: 104383 - DNA, 80 bp, synthetic construct
  source 1..80: mol_type = other DNA
tgacatgacaggacctgataaagagaatgttagtcttttggagtctatttatcctaattcaccaattgtaggtagaatag

SEQ ID NO: 104384 - DNA, 80 bp, synthetic construct
  source 1..80: mol_type = other DNA
acaattaataaattcaaatcgctttattcagcagcttggcatgatgtttccatattttttagtattattgccactgcacc

SEQ ID NO: 104385 - DNA, 80 bp, synthetic construct; identical to SEQ ID NO: 20102
  source 1..80: mol_type = other DNA

SEQ ID NO: 104386 - DNA, 80 bp, synthetic construct
  source 1..80: mol_type = other DNA
atcacaaaatagactgctgatcctgtaccttctgcagacataaagccatcatccatctctgttactctaccacttatttg

SEQ ID NO: 104387 - DNA, 80 bp, synthetic construct
  source 1..80: mol_type = other DNA
ccctcccctcttcccattgttctgcgatgtacggtgtgtccttatataagtgaaattacttgtacgtgtttcggtataca

SEQ ID NO: 104388 - DNA, 80 bp, synthetic construct
  source 1..80: mol_type = other DNA
cacttaaagtgtgtacatggtttattgaattgatttgttttttgaaaaaaaaattgcagatgggctcacagggaaagaat

SEQ ID NO: 104389 - DNA, 80 bp, synthetic construct; identical to SEQ ID NO: 20103
  source 1..80: mol_type = other DNA

SEQ ID NO: 104390 - DNA, 80 bp, synthetic construct
  source 1..80: mol_type = other DNA
ttttcaaaatggttttgcttcctaaccctaccattatatgaagcctctcactttgaaagtcacagactgcggactggtaa

SEQ ID NO: 104391 - DNA, 80 bp, synthetic construct
  source 1..80: mol_type = other DNA
ttttttgtcattttgctttctaaacaaatttagattttggagcagctgctcgtaatgtggaagtgttttttttcccccca

SEQ ID NO: 104392 - DNA, 80 bp, synthetic construct; identical to SEQ ID NO: 20104
  source 1..80: mol_type = other DNA

SEQ ID NO: 104393 - DNA, 80 bp, synthetic construct
  source 1..80: mol_type = other DNA
ggtttcatatttagaattaaggttgtttgccatttcctcctcctatggaagtaatgctcaaaccagtcacatctctattt

SEQ ID NO: 104394 - DNA, 80 bp, synthetic construct
  source 1..80: mol_type = other DNA
agaatgctttccattgaatcatttggtcataatccgggtacaaagcaaatttaacacgtgtgagagatgcagaaaaaggt

SEQ ID NO: 104395 - DNA, 80 bp, synthetic construct
  source 1..80: mol_type = other DNA
agtgcctctatctgccaagcgcatgatcttatgagcttcagatagaaaagtggctatgacttgtgactgtttttggttca

SEQ ID NO: 104396 - DNA, 80 bp, synthetic construct; identical to SEQ ID NO: 20105
  source 1..80: mol_type = other DNA

SEQ ID NO: 104397 - DNA, 80 bp, synthetic construct
  source 1..80: mol_type = other DNA
agtcctcggatatccatttcacttgagtcttatcaatagttttgatgttagggaagacacatgaggctgggtgcggtggc

SEQ ID NO: 104398 - DNA, 80 bp, synthetic construct
  source 1..80: mol_type = other DNA
gggaggctggggcaggaggattgcttgaggccaggagttcgaggctgcagtgagctgtgattgccccactgcactggagc

SEQ ID NO: 104399 - DNA, 80 bp, synthetic construct
  source 1..80: mol_type = other DNA
aatgtatctccattacttgtttacacatctaactctctactaggcttgtgcacccctgaaggcaggaactccatcttaat

SEQ ID NO: 104400 - DNA, 80 bp, synthetic construct
  source 1..80: mol_type = other DNA
ctgagacaaaaattgaatattgatcatcaatggagcacccagatacacttttggggtgatcactttttatggaaaatata

SEQ ID NO: 104401 - DNA, 80 bp, synthetic construct; identical to SEQ ID NO: 20106
  source 1..80: mol_type = other DNA

SEQ ID NO: 104402 - DNA, 80 bp, synthetic construct
  source 1..80: mol_type = other DNA
acaatctctcagcaattcttagagcaaaacagccactgttatctctgcttctgaacgtgcctcctacttttgctcattat

SEQ ID NO: 104403 - DNA, 80 bp, synthetic construct
  source 1..80: mol_type = other DNA
tggggaagaatatttggaacatttgtaggaataggaaagaaaggctttgcaactactaccatacacttaaatttgatagt

SEQ ID NO: 104404 - DNA, 80 bp, synthetic construct; identical to SEQ ID NO: 20107
  source 1..80: mol_type = other DNA

SEQ ID NO: 104405 - DNA, 80 bp, synthetic construct
  source 1..80: mol_type = other DNA
accaagaagtgttgctgaaaacacatttgtcattttaaaaattgtctgaaaacccaaatgtagttcacagctcaactaaa

SEQ ID NO: 104406 - DNA, 80 bp, synthetic construct
  source 1..80: mol_type = other DNA
aagccatggatatcagcgagttctcactgatgcaatgttattagttttgttggagaaaatggaggccagatgtcggtacc

SEQ ID NO: 104407 - DNA, 80 bp, synthetic construct
  source 1..80: mol_type = other DNA
gtcttctcttcagttgttagctatatctaagaaggaggttcacatattgtatgtttaggaaattcattgaagaatgatat

SEQ ID NO: 104408 - DNA, 80 bp, synthetic construct; identical to SEQ ID NO: 20108
  source 1..80: mol_type = other DNA

SEQ ID NO: 104409 - DNA, 80 bp, synthetic construct
  source 1..80: mol_type = other DNA
ttgagatgtgaatttatatggaatgaaattgcttcaccatttggcaggttgagatatgattaactccttagaggcatggg

SEQ ID NO: 104410 - DNA, 80 bp, synthetic construct
  source 1..80: mol_type = other DNA
gcaggcacaacatttaaccattctttctggtattccactaaaagtgggaagaagtttcatagaaacttaagaaagagaag

SEQ ID NO: 104411 - DNA, 80 bp, synthetic construct
  source 1..80: mol_type = other DNA
tctgcaatcaccaaaactttgcttgatgaccagtcatctttcctttctgtcttgtctcagtggacatgttaccctgaatc

SEQ ID NO: 104412 - DNA, 80 bp, synthetic construct; identical to SEQ ID NO: 20109
  source 1..80: mol_type = other DNA

SEQ ID NO: 104413 - DNA, 80 bp, synthetic construct
  source 1..80: mol_type = other DNA
ttgccttggtggggaagaggaaccttatttcagcatttccagatggaaacgtcacacttgataattctaataacatttcc

SEQ ID NO: 104414 - DNA, 80 bp, synthetic construct
  source 1..80: mol_type = other DNA
agtacaacaacattcatgtgtcatgtcctgaataaataacaggattgactgatgacattagcaagccactggattttcca

SEQ ID NO: 104415 - DNA, 80 bp, synthetic construct
  source 1..80: mol_type = other DNA
gggtgttgtcatagaacacagatttctatgtgaatgtttaaaggatattggataaagtcacatggcttattgtgcttggt

SEQ ID NO: 104416 - DNA, 80 bp, synthetic construct; identical to SEQ ID NO: 20110
  source 1..80: mol_type = other DNA

SEQ ID NO: 104417 - DNA, 80 bp, synthetic construct
  source 1..80: mol_type = other DNA
gtgaaatatattttagagaagcttgccttagtggtatatctgctgataaatattgatactatgaagataagcttatcatt

SEQ ID NO: 104418 - DNA, 80 bp, synthetic construct
  source 1..80: mol_type = other DNA
gggaagaattgtttgagtaagaggacgttgtattgtcaaggttcctacagtaagaccatgaggtagttgttgagaaaaga

SEQ ID NO: 104419 - DNA, 80 bp, synthetic construct
  source 1..80: mol_type = other DNA
gacattctgtgtgtttcaggttttaaaagaaaaaatgggtactttggctttgggcttgcaactctgtcacatgagggttg

SEQ ID NO: 104420 - DNA, 80 bp, synthetic construct; identical to SEQ ID NO: 20111
  source 1..80: mol_type = other DNA

SEQ ID NO: 104421 - DNA, 80 bp, synthetic construct
  source 1..80: mol_type = other DNA
acagattaaaataacctgattccttctcaccactgtcccttcagacttgctttgtcgaccatttctttaccactagaagg

SEQ ID NO: 104422 - DNA, 80 bp, synthetic construct
  source 1..80: mol_type = other DNA
tagagtgagggtgcaggcaagaactcccatctggatgttgttcattctggaaggagtccaatctaggctttttttactct

SEQ ID NO: 104423 - DNA, 80 bp, synthetic construct
  source 1..80: mol_type = other DNA
ttccggggcacatgtaatcccagagtgcaccacggagctggccctctggtgtggtgtgttgtatttttttatctaacgtg

SEQ ID NO: 104424 - DNA, 80 bp, synthetic construct; identical to SEQ ID NO: 20112
  source 1..80: mol_type = other DNA

SEQ ID NO: 104425 - DNA, 80 bp, synthetic construct
  source 1..80: mol_type = other DNA
caaagtttcccccttttcaatttcaacccctttgtatccttagagtggaaatatctatttttagtcaccccttttgcagg

SEQ ID NO: 104426 - DNA, 80 bp, synthetic construct
  source 1..80: mol_type = other DNA
catcttggatctggccatctcttccaatcacttgtttctagcataagatctgaaatgtttttatgtggcctgcaatttaa

SEQ ID NO: 104427 - DNA, 80 bp, synthetic construct
  source 1..80: mol_type = other DNA
aaagtgaaaacagaaattggctccatgaaaacagtctgcgtgctacagcggatccaccctagtattgatacttcagaagt

SEQ ID NO: 104428 - DNA, 80 bp, synthetic construct; identical to SEQ ID NO: 20113
  source 1..80: mol_type = other DNA

SEQ ID NO: 104429 - DNA, 80 bp, synthetic construct
  source 1..80: mol_type = other DNA
actcccaattagttattttaaccacttccaattgccttggattctggattcgtgaaattaataagcaagtattactcttt

SEQ ID NO: 104430 - DNA, 80 bp, synthetic construct
  source 1..80: mol_type = other DNA
tacaaaatagtgactattgattgatttgactaaatagccaaagcacccagaccttattttttttcctctaaatagaggag

SEQ ID NO: 104431 - DNA, 80 bp, synthetic construct
  source 1..80: mol_type = other DNA
tcagataacgtgctagcagtgaaatatatcagcactaagtcaacttttcccctgttattgtacagtttgttttggcaaat

SEQ ID NO: 104432 - DNA, 80 bp, synthetic construct
  source 1..80: mol_type = other DNA
ctgccttcctctctcttaaatgacaaactggagactgtaatcatcagcaaattaaacatgctttttgatgttagaatatt

SEQ ID NO: 104433 - DNA, 80 bp, synthetic construct; identical to SEQ ID NO: 20114
  source 1..80: mol_type = other DNA

SEQ ID NO: 104434 - DNA, 80 bp, synthetic construct
  source 1..80: mol_type = other DNA
agcagatgttctcagtagggcgatgcttacccctaaccagtgtatttaattttgtgacagagaaaaagtagctattatat

SEQ ID NO: 104435 - DNA, 80 bp, synthetic construct
  source 1..80: mol_type = other DNA
agtgaattttgatggtataatctgagaccttcagagtgtgagtatttgccaggcggtcaggtagaagaatgtcagattaa

SEQ ID NO: 104436 - DNA, 80 bp, synthetic construct; identical to SEQ ID NO: 20115
  source 1..80: mol_type = other DNA

SEQ ID NO: 104437 - DNA, 80 bp, synthetic construct
  source 1..80: mol_type = other DNA
agaaggggcgagcaggagctcagtagagtcagaggagtgaaaagttacaaaaggttcattggtgtaaatgtgattagacc

SEQ ID NO: 104438 - DNA, 80 bp, synthetic construct
  source 1..80: mol_type = other DNA
ggcaggtactttagtggagggctgggatcatccttgacatgcagtcttgaacagttagaaactatatttattagtgtttg

SEQ ID NO: 104439 - DNA, 80 bp, synthetic construct
  source 1..80: mol_type = other DNA
gtaagtaaaggaaaccaacatatgaaccaaatgtagaccctcacaagagagttctcatcctgatgtttttccatcagggt

SEQ ID NO: 104440 - DNA, 80 bp, synthetic construct; identical to SEQ ID NO: 20116
  source 1..80: mol_type = other DNA

SEQ ID NO: 104441 - DNA, 80 bp, synthetic construct
  source 1..80: mol_type = other DNA
tagtacaatgttgtactaataggtaatacctgtgtaggtttttggttaatttatctaacaaatacatttataagtttatc

SEQ ID NO: 104442 - DNA, 80 bp, synthetic construct
  source 1..80: mol_type = other DNA
tagatgtcaaatgtgcagaaggtcttgagtcttgcttggcattggagaatattccactgttgtggttctttcatattatt

SEQ ID NO: 104443 - DNA, 80 bp, synthetic construct
  source 1..80: mol_type = other DNA
gactacaggtgtgtactaccctgcccagataaatttttgtatttttagtagagacgggtttttgccatgttgcccagcct

SEQ ID NO: 104444 - DNA, 80 bp, synthetic construct; identical to SEQ ID NO: 20117
  source 1..80: mol_type = other DNA

SEQ ID NO: 104445 - DNA, 80 bp, synthetic construct
  source 1..80: mol_type = other DNA
gggcttatggaatcagagtgtagcatagaataaaatagcactcagatatgatagatgccttggatttcttgctggcttat

SEQ ID NO: 104446 - DNA, 80 bp, synthetic construct
  source 1..80: mol_type = other DNA
gttagtgtgtttgtccataatcagtgggggtttcggacatttgggtaacagtcagctgtgtaagctgctgctttgaaaag

SEQ ID NO: 104447 - DNA, 80 bp, synthetic construct
  source 1..80: mol_type = other DNA
ttttttttttttttcctgtagcaggcaggaaatgtagcagttaagagcttgggctccaaatccaccgccagagtttaaat

SEQ ID NO: 104448 - DNA, 80 bp, synthetic construct; identical to SEQ ID NO: 20118
  source 1..80: mol_type = other DNA

SEQ ID NO: 104449 - DNA, 80 bp, synthetic construct
  source 1..80: mol_type = other DNA
caacaataataactgcagtagcagcaaccacagcagtgacttaaaaccagcctcataacgtgccagatactgaattaagt

SEQ ID NO: 104450 - DNA, 80 bp, synthetic construct
  source 1..80: mol_type = other DNA
tgtggacctctgaccagcgacctttcttctcctgcctgtctttatgatatatagcacgttctgttcaatgaataaaagca

SEQ ID NO: 104451 - DNA, 80 bp, synthetic construct
  source 1..80: mol_type = other DNA
ggatctggtctgaagacctggcactaacctttaataattaagtcacaatgggcccattaatttagtcttgttgaacttca

SEQ ID NO: 104452 - DNA, 80 bp, synthetic construct
  source 1..80: mol_type = other DNA
gctcattttctttatctaaaacatgttgcttctttgattgaggggaaaaatgtcaacttttgttgaaatattttatgtgt

SEQ ID NO: 104453 - DNA, 80 bp, synthetic construct; identical to SEQ ID NO: 20119
  source 1..80: mol_type = other DNA

SEQ ID NO: 104454 - DNA, 80 bp, synthetic construct
  source 1..80: mol_type = other DNA
ggatttgacgtcgtctgatacttttaaagaatatgaccccgatggcaagggagtcatttccaagagggacttccacaaag

SEQ ID NO: 104455 - DNA, 80 bp, synthetic construct
  source 1..80: mol_type = other DNA
cctctctgagcacatgcccaacgatacccgacttcagacttttctggaattagcagagagcgtcctgaattatttccagc

SEQ ID NO: 104456 - DNA, 80 bp, synthetic construct
  source 1..80: mol_type = other DNA
agttcatatttgacgtggtcaacgaaggcggagagaaagagaagatggaactctttgtgaacttctgcgaggacaccatc

SEQ ID NO: 104457 - DNA, 80 bp, synthetic construct; identical to SEQ ID NO: 20120
  source 1..80: mol_type = other DNA

SEQ ID NO: 104458 - DNA, 80 bp, synthetic construct
  source 1..80: mol_type = other DNA
ctcgtcgaaggtgctaaaaagatcaaagttgcagaactgttagccaacatgccagaccccactcaggatgaggttagagg

SEQ ID NO: 104459 - DNA, 80 bp, synthetic construct
  source 1..80: mol_type = other DNA
ccaaatgctgggctcagtgacctcatgagcaacccagtccccatgcctgaggtgcaggaaaaatttcaggtaatttatct

SEQ ID NO: 104460 - DNA, 80 bp, synthetic construct
  source 1..80: mol_type = other DNA
tgaattattaaattatcttaaactattatggtgtaagcttcagtacccaccctaactgtagcctacatctttctccacgt

SEQ ID NO: 104461 - DNA, 80 bp, synthetic construct; identical to SEQ ID NO: 20121
  source 1..80: mol_type = other DNA

SEQ ID NO: 104462 - DNA, 80 bp, synthetic construct
  source 1..80: mol_type = other DNA
gggttgcttatgttgagaaaatggcaatgccgctatggtttaaagtagttagataagaatgaagaggtaggacttaaact

SEQ ID NO: 104463 - DNA, 80 bp, synthetic construct
  source 1..80: mol_type = other DNA
gaaaaacacgtggcgcttttatcgtggtataagcaagagggtatcttatataggttatggtttgacacatggtcacatgg

SEQ ID NO: 104464 - DNA, 80 bp, synthetic construct
  source 1..80: mol_type = other DNA
ttcgtttcagtttgtcattacatctctttttcttgtactctgtctttgggagctgcaagggagaatctcatattgtcaag

SEQ ID NO: 104465 - DNA, 80 bp, synthetic construct; identical to SEQ ID NO: 20122
  source 1..80: mol_type = other DNA

SEQ ID NO: 104466 - DNA, 80 bp, synthetic construct
  source 1..80: mol_type = other DNA
ttctgtcctttccaagaagggaggaaacaaacattccaaatgcgctttcatagaatcctgtggagtggtgctccttaaac

SEQ ID NO: 104467 - DNA, 80 bp, synthetic construct
  source 1..80: mol_type = other DNA
agctggatgtgaggcgatgaaaatgcataactccctcataacaccaggtttctctgaataatcgaagcctacatctttct

SEQ ID NO: 104468 - DNA, 80 bp, synthetic construct; identical to SEQ ID NO: 20123
  source 1..80: mol_type = other DNA

SEQ ID NO: 104469 - DNA, 80 bp, synthetic construct
  source 1..80: mol_type = other DNA
ttaatttaatgaaggactgatattttgcacctaaaggatatcaaatgtcaattcttctaattccattattgttggaatta

SEQ ID NO: 104470 - DNA, 80 bp, synthetic construct
  source 1..80: mol_type = other DNA
tataggctgggcgtggtggctcacacctgtaatcccagcactttgggaggccgaggcgggcggatcataaggtcaggagt

SEQ ID NO: 104471 - DNA, 80 bp, synthetic construct
  source 1..80: mol_type = other DNA
atggcgcccctgcattccagcctgggtgacagagcgagactctgtctcaaaaacaaaaaaaaaaaaaaaaaaaaaggatt

SEQ ID NO: 104472 - DNA, 80 bp, synthetic construct; identical to SEQ ID NO: 20124
  source 1..80: mol_type = other DNA

SEQ ID NO: 104473 - DNA, 80 bp, synthetic construct
  source 1..80: mol_type = other DNA
ataggggagaagatggagaaaaagaagagaaagccaaggaagacaagggcaaacaaaagttgaggcagcttcacacacac

SEQ ID NO: 104474 - DNA, 80 bp, synthetic construct
  source 1..80: mol_type = other DNA
agtggcagttagggaaccaggttagtccagcacatgtttgatttgctcattgtagtgtgtttatcttttatagtgaatgt

SEQ ID NO: 104475 - DNA, 80 bp, synthetic construct
  source 1..80: mol_type = other DNA
aggacaagtgaataaacatagtctaaggacctgcaacagattttaaagcaagatgtgccttctaggacacaagtaattca

SEQ ID NO: 104476 - DNA, 80 bp, synthetic construct
  source 1..80: mol_type = other DNA
cactttccattgataataagaaggtctattcaaaattgttctttaagagagggattacagttctttatatactgtcctgt

SEQ ID NO: 104477 - DNA, 80 bp, synthetic construct; identical to SEQ ID NO: 20125
  source 1..80: mol_type = other DNA

SEQ ID NO: 104478 - DNA, 80 bp, synthetic construct
  source 1..80: mol_type = other DNA
catgtagaatccacctacaagaggtactgaccagtgatgttagacctagaatttaagaacaacaaccctcataagaaagc

SEQ ID NO: 104479 - DNA, 80 bp, synthetic construct
  source 1..80: mol_type = other DNA
tgagaaatcaaaaattgacaactcagaacctcaatgaactatagaatttcacctataaggaaagtggactgtcctcagta

SEQ ID NO: 104480 - DNA, 80 bp, synthetic construct; identical to SEQ ID NO: 20126
  source 1..80: mol_type = other DNA

SEQ ID NO: 104481 - DNA, 80 bp, synthetic construct
  source 1..80: mol_type = other DNA
gtgtcagggttcacatgttctgttgtctctgcacagctcctcccttttcctgcatctctttgctatctttctcggctcac

SEQ ID NO: 104482 - DNA, 80 bp, synthetic construct
  source 1..80: mol_type = other DNA
ttgttctaataagctctggcagtaaagatggggtcctgtgtggggaaatgacacgaacagagatgggctgtgtacacaga

SEQ ID NO: 104483 - DNA, 80 bp, synthetic construct
  source 1..80: mol_type = other DNA
attttttcccagcccaataaattgtaccagctgttcccttagttgctgaggctcccaaattcagaaggtatcatctttga

SEQ ID NO: 104484 - DNA, 80 bp, synthetic construct; identical to SEQ ID NO: 20127
  source 1..80: mol_type = other DNA

SEQ ID NO: 104485 - DNA, 80 bp, synthetic construct
  source 1..80: mol_type = other DNA
acacttaagagttaaggtcttttgttattcccacttcgcatgcagatgagcagagtgatgctacagaaaagattaagtca

SEQ ID NO: 104486 - DNA, 80 bp, synthetic construct
  source 1..80: mol_type = other DNA
tccccctgccacccccacacatcagtctcccttcttctcactgtgtttccttctatttctcaaacacaccaacatcactc

SEQ ID NO: 104487 - DNA, 80 bp, synthetic construct
  source 1..80: mol_type = other DNA
cccctattccctaagctcctaacccgatgtagttttcttcttagcatttaacattctctgaaattatgtttttcacttgc

SEQ ID NO: 104488 - DNA, 80 bp, synthetic construct
  source 1..80: mol_type = other DNA
agcctgttgattcagtgaccttttcataatgtttttcaccctcagaactattttgctcgcaacttttacaacatgagaat

SEQ ID NO: 104489 - DNA, 80 bp, synthetic construct; identical to SEQ ID NO: 20128
  source 1..80: mol_type = other DNA

SEQ ID NO: 104490 - DNA, 80 bp, synthetic construct
  source 1..80: mol_type = other DNA
ttgtgactatgcctgggtgtggcataccgtattatattacattcttttgtaattgagaagagagcttagccatctaattt

SEQ ID NO: 104491 - DNA, 80 bp, synthetic construct
  source 1..80: mol_type = other DNA
aggctgtatttcttttgtcttttgcttgcaatggtatcttagatgcagcaaactgactctactttaaatgctttgaatca

SEQ ID NO: 104492 - DNA, 80 bp, synthetic construct; identical to SEQ ID NO: 20129
  source 1..80: mol_type = other DNA

SEQ ID NO: 104493 - DNA, 80 bp, synthetic construct
  source 1..80: mol_type = other DNA
gaaactttgtgcacaaagtttctgagggaatgctccatgaatcaacatgcatggggcaaatggaggaaggatgggacaga

SEQ ID NO: 104494 - DNA, 80 bp, synthetic construct
  source 1..80: mol_type = other DNA
aagtagctttctttcatatactgataattattcacatagagaatttcgcctataacttggccctacagaagtgagctcac

SEQ ID NO: 104495 - DNA, 80 bp, synthetic construct
  source 1..80: mol_type = other DNA
agaaaataatgcagctttatccccagaggcctgccaagggaacaatataatttggtgaatagaacccaagataatctctc

SEQ ID NO: 104496 - DNA, 80 bp, synthetic construct; identical to SEQ ID NO: 20130
  source 1..80: mol_type = other DNA

SEQ ID NO: 104497 - DNA, 80 bp, synthetic construct
  source 1..80: mol_type = other DNA
tggtgatgctgagcatgaaattattaaagaggtttctcaaataaaactgcactttagtagcatgcatttgggaacattgc

SEQ ID NO: 104498 - DNA, 80 bp, synthetic construct
  source 1..80: mol_type = other DNA
tatctattctatcttctgtttttccaaaaccttctagatgcttcttcctgcttgaatatagctgattcattttcattcca

SEQ ID NO: 104499 - DNA, 80 bp, synthetic construct
  source 1..80: mol_type = other DNA
cacggaaattggaatttgatgggctttatattacagaacagccttcagaagatgatattaaaggccagtgggatagactc

SEQ ID NO: 104500 - DNA, 80 bp, synthetic construct; identical to SEQ ID NO: 20131
  source 1..80: mol_type = other DNA

SEQ ID NO: 104501 - DNA, 80 bp, synthetic construct
  source 1..80: mol_type = other DNA
ggcagggttatctcatccaaaagcagaggcaaaaattattcattaacgaaaaagttgtagcattaaaggaaaatgcattg

SEQ ID NO: 104502 - DNA, 80 bp, synthetic construct
  source 1..80: mol_type = other DNA
tctatccaataaacatttagccctgtgagatcaagacccaaactactagctgctgttctgagtataagtccatcacaaaa

SEQ ID NO: 104503 - DNA, 80 bp, synthetic construct
  source 1..80: mol_type = other DNA
gggttccgagttgtcaaatggagattatttatacatgatacatgtttatcctaaatgctaaatgttttgtttagcaattc

SEQ ID NO: 104504 - DNA, 80 bp, synthetic construct
  source 1..80: mol_type = other DNA
tttgctgctatgctcgaagtttctgtgaggataagtggtgggaaagagatttttttcttcatgggaaaaacaatgacagg

SEQ ID NO: 104505 - DNA, 80 bp, synthetic construct; identical to SEQ ID NO: 20132
  source 1..80: mol_type = other DNA

SEQ ID NO: 104506 - DNA, 80 bp, synthetic construct
  source 1..80: mol_type = other DNA
ggaatcctctacatttttcttaaagcacagtttagatttttatttgatgtgattcagatgtagaataagatattgaggta

SEQ ID NO: 104507 - DNA, 80 bp, synthetic construct
  source 1..80: mol_type = other DNA
gggattccaggcgcctgccaccacacccggctaatttttgtatttttagtcgagatggggtttcgccatgttggcctggc

SEQ ID NO: 104508 - DNA, 80 bp, synthetic construct
  source 1..80: mol_type = other DNA
atgtgtgtgtgtgtatatatatatatgtatatgtatatatatatatatatacacatatatatatacacacatatatggat

SEQ ID NO: 104509 - DNA, 80 bp, synthetic construct
  source 1..80: mol_type = other DNA
tgtgttcgatttttatgtggaggaggtacaagtgttttgttccctcgtgacctggcatcttgagtcgcactgcgctagtg

SEQ ID NO: 104510 - DNA, 80 bp, synthetic construct; identical to SEQ ID NO: 20133
  source 1..80: mol_type = other DNA

SEQ ID NO: 104511 - DNA, 80 bp, synthetic construct
  source 1..80: mol_type = other DNA
ccggctcaaatcagcccagcccatttttagcactgtgagaataatgcaaaacaaatggttttaattaacctaagtagttc

SEQ ID NO: 104512 - DNA, 80 bp, synthetic construct
  source 1..80: mol_type = other DNA
aatcttgtattttcacattctgtctccttttctaatcttttctcctgtatagtggactccttttttgctaccagtgatct

SEQ ID NO: 104513 - DNA, 80 bp, synthetic construct
  source 1..80: mol_type = other DNA
tctcccaagtagctgggattacaggtgtctaccaccatgcctggctaatttttgtatatttagtaaagacaaggtctcac

SEQ ID NO: 104514 - DNA, 80 bp, synthetic construct; identical to SEQ ID NO: 20134
  source 1..80: mol_type = other DNA

SEQ ID NO: 104515 - DNA, 80 bp, synthetic construct
  source 1..80: mol_type = other DNA
tgatagacatggaatctatactagatgctaattaaaatgaggatggtgacaaggttgcaggtcctggtgttttactgaag

SEQ ID NO: 104516 - DNA, 80 bp, synthetic construct
  source 1..80: mol_type = other DNA
tcaggcatggcctggttgcttcctggacccatctcttgctgagtttagcaaacttaggcacattacatgaagttttctaa

SEQ ID NO: 104517 - DNA, 80 bp, synthetic construct
  source 1..80: mol_type = other DNA
tcttctttggtatgactccctctcttgaatgagagagaaatcttgttcctcagataggtattatgtaagatgctgtgaat

SEQ ID NO: 104518 - DNA, 80 bp, synthetic construct; identical to SEQ ID NO: 20135
  source 1..80: mol_type = other DNA

SEQ ID NO: 104519 - DNA, 80 bp, synthetic construct
  source 1..80: mol_type = other DNA
aatgtcagaagaatagatagatgaggaaaacagaaagtatataaagtctacttttacacttcttggtatttggaactctg

SEQ ID NO: 104520 - DNA, 80 bp, synthetic construct
  source 1..80: mol_type = other DNA
tggtaattcctgtttgaaaaaacgttaattttcttatgttttggaaaagggaactatgtagcccttgtatttaaaatgtt

SEQ ID NO: 104521 - DNA, 80 bp, synthetic construct; identical to SEQ ID NO: 20136
  source 1..80: mol_type = other DNA

SEQ ID NO: 104522 - DNA, 80 bp, synthetic construct
  source 1..80: mol_type = other DNA
tttctcttaacatgagtagggatgtgatggttactttgaaaacatatttctggttctgtgaagcagtattattttcttaa

SEQ ID NO: 104523 - DNA, 80 bp, synthetic construct
  source 1..80: mol_type = other DNA
ctctaggaaaacaaatgtatatttaaacgttgtgccgctgcctgtaaaatgaaacaccgatgggcaatccttaggatctg

SEQ ID NO: 104524 - DNA, 80 bp, synthetic construct
  source 1..80: mol_type = other DNA
tgttccttatgttagaatatcatgaaacaagaactagggtgtgaggctgagcatcccacaaacattttcagatccttaac

SEQ ID NO: 104525 - DNA, 80 bp, synthetic construct; identical to SEQ ID NO: 20137
  source 1..80: mol_type = other DNA

SEQ ID NO: 104526 - DNA, 80 bp, synthetic construct
  source 1..80: mol_type = other DNA
atttatatatttatttatcaaacacataaggcttggtatgtgcacctttaaataagtggccagctccattcctgggggtg

SEQ ID NO: 104527 - DNA, 80 bp, synthetic construct
  source 1..80: mol_type = other DNA
ggccgtgttctgattggcttagctcagccatggccctcccccagaggtggggtcagcctcaccgaaacaaacagcatggc

SEQ ID NO: 104528 - DNA, 80 bp, synthetic construct
  source 1..80: mol_type = other DNA
tctgttttagattgctttaatgtaaaataattatgctcccatgcaaactactacattttttcccccaactcttccttttt

SEQ ID NO: 104529 - DNA, 80 bp, synthetic construct
  source 1..80: mol_type = other DNA
aaaaattgtttttaatcctggagtaagttaaatgagccttaacccttagtgaaaaaaatctcctaaaaagtcaccttcga

SEQ ID NO: 104530 - DNA, 80 bp, synthetic construct; identical to SEQ ID NO: 20138
  source 1..80: mol_type = other DNA

SEQ ID NO: 104531 - DNA, 80 bp, synthetic construct
  source 1..80: mol_type = other DNA
gcacccacaactgtaagacaatgtggaaaataataataaaaggaattgtctacaaaatgctatgagaactgaggggaagg

SEQ ID NO: 104532 - DNA, 80 bp, synthetic construct
  source 1..80: mol_type = other DNA
attctgttggaatgcaattgcaagtgcatatgaaagtgaggaaatgtttgatgtgtacatatgttggccaatttagtaca

SEQ ID NO: 104533 - DNA, 80 bp, synthetic construct
  source 1..80: mol_type = other DNA
aaaaaaaaattcgctgggagcggtagcacatgcctgtaatcccagctactcgggaggctgaggcacgagaatcgcttgaa

SEQ ID NO: 104534 - DNA, 80 bp, synthetic construct; identical to SEQ ID NO: 20139
  source 1..80: mol_type = other DNA

SEQ ID NO: 104535 - DNA, 80 bp, synthetic construct
  source 1..80: mol_type = other DNA
ccattgatgtgaagtatcagatgtggaaactaggagtcgttttcactgacaacgtaagcctacttcattatcacaaaaga

SEQ ID NO: 104536 - DNA, 80 bp, synthetic construct
  source 1..80: mol_type = other DNA
aatagctgaaatagtaaaatgaaaatatatgaaaaactgagatgcagatttgtgagtacgttcattaaggttttaattgg

SEQ ID NO: 104537 - DNA, 80 bp, synthetic construct
  source 1..80: mol_type = other DNA
gagactaaatatagggccgtaatatatatccaaatagaaaaaaattacctattactaaaaaccgccaggtgtctcaagat

SEQ ID NO: 104538 - DNA, 80 bp, synthetic construct; identical to SEQ ID NO: 20140
  source 1..80: mol_type = other DNA

SEQ ID NO: 104539 - DNA, 80 bp, synthetic construct
  source 1..80: mol_type = other DNA
cacagtatttgcatagcccacttttgcccagatgcagcttctgcccagatgcagcttatccataatattcatcttgcttt

SEQ ID NO: 104540 - DNA, 80 bp, synthetic construct
  source 1..80: mol_type = other DNA
tggccaatcacctctcaacatgcattcattcttcactattactgtgtctctctgaaacatagccatggttaccagacgaa

SEQ ID NO: 104541 - DNA, 80 bp, synthetic construct; identical to SEQ ID NO: 20141
  source 1..80: mol_type = other DNA

SEQ ID NO: 104542 - DNA, 80 bp, synthetic construct
  source 1..80: mol_type = other DNA
ctaattttttgtacttttagtagagacggggtttcaccatgttagccaggatggtctcgatctcctgacctcgtgaaccg

SEQ ID NO: 104543 - DNA, 80 bp, synthetic construct
  source 1..80: mol_type = other DNA
ccttctcctctgctcctccccaccaaatccagtcttcggtctacaattttctcttttagtatttttgttcttcttactac

SEQ ID NO: 104544 - DNA, 80 bp, synthetic construct
  source 1..80: mol_type = other DNA
gggtttgtccagtagtcttctaatttaatggctttgccacttacaatgattttagacaatagcttaactagagcaagctc

SEQ ID NO: 104545 - DNA, 80 bp, synthetic construct; identical to SEQ ID NO: 20142
  source 1..80: mol_type = other DNA

SEQ ID NO: 104546 - DNA, 80 bp, synthetic construct
  source 1..80: mol_type = other DNA
tttctgccacttgacctctagcttcagttccacatggtccttgaaatccctttactagctcagccccctctttttattct

SEQ ID NO: 104547 - DNA, 80 bp, synthetic construct
  source 1..80: mol_type = other DNA
ccctcccccaaaagtgtattcattttccagcctatgtgaataatcaacattaattataacccaggagacttctacaacag

SEQ ID NO: 104548 - DNA, 80 bp, synthetic construct
  source 1..80: mol_type = other DNA
cagtgaataaatgaaaagcaaagaagggaagaaaaggagggagagaaagcgactggttcttttgttggctgtagagcaag

SEQ ID NO: 104549 - DNA, 80 bp, synthetic construct; identical to SEQ ID NO: 20143
  source 1..80: mol_type = other DNA

SEQ ID NO: 104550 - DNA, 80 bp, synthetic construct
  source 1..80: mol_type = other DNA
tctgtcggaggataaataacaacgacaattcctgaaacactttaaaactgttttaaaggaggatgacactgaccttttca

SEQ ID NO: 104551 - DNA, 80 bp, synthetic construct
  source 1..80: mol_type = other DNA
tcctggttaacacagtgaaaccccgtctctactaaaaatacaaaataattagccgggcgtggtggcggacgcttgtagtc

SEQ ID NO: 104552 - DNA, 80 bp, synthetic construct
  source 1..80: mol_type = other DNA
aagtaaatggagtaattataacagagtgaaatcagagttactttttaattgtatttttttaattgacatattcatggggt

SEQ ID NO: 104553 - DNA, 80 bp, synthetic construct
  source 1..80: mol_type = other DNA
gtatagaaccccagaacttattttttctatctagctataactttgtatcttttaacaaatctctccctattcctacctct

SEQ ID NO: 104554 - DNA, 80 bp, synthetic construct; identical to SEQ ID NO: 20144
  source 1..80: mol_type = other DNA

SEQ ID NO: 104555 - DNA, 80 bp, synthetic construct
  source 1..80: mol_type = other DNA
aaaaataaaactacccctcaaatgacaatgtacagttttaaagatttttttgaagggagggtctgcacctgttctaaact

SEQ ID NO: 104556 - DNA, 80 bp, synthetic construct
  source 1..80: mol_type = other DNA
aaaacaaatgtgtatgccttaacacagcccctggcccatatcaagcactcaggaacttagttattattttgttcctagta

SEQ ID NO: 104557 - DNA, 80 bp, synthetic construct; identical to SEQ ID NO: 20145
  source 1..80: mol_type = other DNA

SEQ ID NO: 104558 - DNA, 80 bp, synthetic construct
  source 1..80: mol_type = other DNA
cccagcacattttaaaataattgcctctctaaaagctttgaactgggtccacagttaagtccacattatcatcagttttc

SEQ ID NO: 104559 - DNA, 80 bp, synthetic construct
  source 1..80: mol_type = other DNA
aaatgtatgtgtgtttctacataaaaggtccggcactactttccatttctgagctttgtggggtttctttttgagggatc

SEQ ID NO: 104560 - DNA, 80 bp, synthetic construct
  source 1..80: mol_type = other DNA
gcctcagcctcccgcatagctgggattataggcgcgtgccaccatgcccggctaatttttgtatttttagtagagatggg

SEQ ID NO: 104561 - DNA, 80 bp, synthetic construct
  source 1..80: mol_type = other DNA
ttgcagaaatatgtagagctttatagtcctaacaggtgaaacatgcagaaattcacagtaaccttgcacttcatttatag

SEQ ID NO: 104562 - DNA, 80 bp, synthetic construct; identical to SEQ ID NO: 20146
  source 1..80: mol_type = other DNA

SEQ ID NO: 104563 - DNA, 80 bp, synthetic construct
  source 1..80: mol_type = other DNA
gagctgaaagacctttcaaacagagacatttaattatagattgagaaaaatagccttcaaaacagtgttggtcactagct

SEQ ID NO: 104564 - DNA, 80 bp, synthetic construct
  source 1..80: mol_type = other DNA
cagtcataacaaaaacgaaatgcattttattaggaatgtaatttatagaaaatagccctcataaaatgaagaaagggccg

SEQ ID NO: 104565 - DNA, 80 bp, synthetic construct
  source 1..80: mol_type = other DNA
ccactactcgggaggctgaggcaggagaatcgcttgaacccgggaggcagaggttgcagtgagctcagattgtgccacag

SEQ ID NO: 104566 - DNA, 80 bp, synthetic construct; identical to SEQ ID NO: 20147
  source 1..80: mol_type = other DNA

SEQ ID NO: 104567 - DNA, 80 bp, synthetic construct
  source 1..80: mol_type = other DNA
gatatgctaacagtaagttcataacctttgatctcacataaacaaaaatgtctcctgcttctgcagtctaagtaattgtg

SEQ ID NO: 104568 - DNA, 80 bp, synthetic construct
  source 1..80: mol_type = other DNA
gtaatgtacttagaactcgaaggagtaatgtcatcacttaagcctgttgttcacatatcccaggacaacgggtaaaacta

SEQ ID NO: 104569 - DNA, 80 bp, synthetic construct; identical to SEQ ID NO: 20148
  source 1..80: mol_type = other DNA

SEQ ID NO: 104570 - DNA, 80 bp, synthetic construct
  source 1..80: mol_type = other DNA
gggatgtaggtatagaggctgatataatgatacataaattactctagaaaaaatagcccaaaagattgatgagaatgacc

SEQ ID NO: 104571 - DNA, 80 bp, synthetic construct
  source 1..80: mol_type = other DNA
gtaccatggacaagctatttggggggaaatgataaaaatggatgccaaccttgctttttaaataaaaataaattctgaaa

SEQ ID NO: 104572 - DNA, 80 bp, synthetic construct
  source 1..80: mol_type = other DNA
ataaagtcgtaaaggcaaatggtaaactgggaaagatatatttaacaccataacaaagggccattttccttaatctacca

SEQ ID NO: 104573 - DNA, 80 bp, synthetic construct
  source 1..80: mol_type = other DNA
actttttacctatcaggtttgcaaagtattcacgtttgttaaaacccacagttggtgaattgatgggaaaaatcagcatt

SEQ ID NO: 104574 - DNA, 80 bp, synthetic construct; identical to SEQ ID NO: 20149
  source 1..80: mol_type = other DNA

SEQ ID NO: 104575 - DNA, 80 bp, synthetic construct
  source 1..80: mol_type = other DNA
ttcatatttttgatatgctggaatatgcataacatttttctggagggatttattcataggacactgtgaacaaggattcc

SEQ ID NO: 104576 - DNA, 80 bp, synthetic construct
  source 1..80: mol_type = other DNA
gataatctgccttcagttattcccacaattagtataactacatgcagtgactgttccctggcagggaggagagaacagaa

SEQ ID NO: 104577 - DNA, 80 bp, synthetic construct; identical to SEQ ID NO: 20150
  source 1..80: mol_type = other DNA

SEQ ID NO: 104578 - DNA, 80 bp, synthetic construct
  source 1..80: mol_type = other DNA
cttcagacaagattgtcattctttagcttttcaatattaagcattttgttctcttcccaactttctttttaataaaaaaa

SEQ ID NO: 104579 - DNA, 80 bp, synthetic construct
  source 1..80: mol_type = other DNA
tggaacttcaaaaagggatgcttttgatggagaatgcagggggaaaaagctttcaactcatccttccacacatagttgac

SEQ ID NO: 104580 - DNA, 80 bp, synthetic construct
  source 1..80: mol_type = other DNA
gttcatggttgttcatccataaacttaattcctcaactggaagaaaatgccatcccagttacaaatccacagtcttgtag

SEQ ID NO: 104581 - DNA, 80 bp, synthetic construct; identical to SEQ ID NO: 20151
  source 1..80: mol_type = other DNA

SEQ ID NO: 104582 - DNA, 80 bp, synthetic construct
  source 1..80: mol_type = other DNA
gttcttttttctgggatcctccaagaaaagagtgccccagaaattccagaagttttggaaaaccttgtggatcagtattc

SEQ ID NO: 104583 - DNA, 80 bp, synthetic construct
  source 1..80: mol_type = other DNA
acttattaatgtcacatgataccacagggtggaagatattgatacggacatagatcaagtgccttaatacttgagatcca

SEQ ID NO: 104584 - DNA, 80 bp, synthetic construct
  source 1..80: mol_type = other DNA
ttcttaaaaccatctcctatccttccttttgctgcttttctcgcaccacaaagcagagaaaaatgtataagttttttttt

SEQ ID NO: 104585 - DNA, 80 bp, synthetic construct; identical to SEQ ID NO: 20152
  source 1..80: mol_type = other DNA

SEQ ID NO: 104586 - DNA, 80 bp, synthetic construct
  source 1..80: mol_type = other DNA
acccgacaaaatttataaatctcaatatctaccagcctcagggcagaaagtttacttaggttatgtattcctaaaggcta

SEQ ID NO: 104587 - DNA, 80 bp, synthetic construct
  source 1..80: mol_type = other DNA
atgcagtcgtcatagttgaccccattcaagttgtaatcataggatccttaaacgactacattttgaacctcactctcagt

SEQ ID NO: 104588 - DNA, 80 bp, synthetic construct
  source 1..80: mol_type = other DNA
gagcctagatttttttcagtttgagggatttctgtcctcatgagtaagactatttatgaccagctctgttgtaggttttt

SEQ ID NO: 104589 - DNA, 80 bp, synthetic construct
  source 1..80: mol_type = other DNA
aaccagacaggagtctgtgtagcattacacacgctcatatcccagtaattgtccctaaaaactcccacatgggaatggag

SEQ ID NO: 104590 - DNA, 80 bp, synthetic construct; identical to SEQ ID NO: 20153
  source 1..80: mol_type = other DNA

SEQ ID NO: 104591 - DNA, 80 bp, synthetic construct
  source 1..80: mol_type = other DNA
tcatgtcacattttattcacttcatcctgagtttctttgttgtttctggttgtttctgtggctctgagagaacatcttag

SEQ ID NO: 104592 - DNA, 80 bp, synthetic construct
  source 1..80: mol_type = other DNA
tgagcctgagaatctaattaaaccagcagtatcctgatagaatttgaacctcctctacaagaatgtaggaggagaaagag

SEQ ID NO: 104593 - DNA, 80 bp, synthetic construct
  source 1..80: mol_type = other DNA
ctttccaggtgattaagatgaaaagtacactcctagggaaataaacttgcttaggtaattgttctaaattacctcactta

SEQ ID NO: 104594 - DNA, 80 bp, synthetic construct; identical to SEQ ID NO: 20154
  source 1..80: mol_type = other DNA

SEQ ID NO: 104595 - DNA, 80 bp, synthetic construct
  source 1..80: mol_type = other DNA
tcagttgcagcaggataatttggtagctgaaagcctgacagccatgtattggaagttattcaccacatacctcctattcc

SEQ ID NO: 104596 - DNA, 80 bp, synthetic construct
  source 1..80: mol_type = other DNA
ttttcagcatgactgttaagtccactaccgatctctgctggaatcccttcatcacaatgcataaagctgatgtaaaatga

SEQ ID NO: 104597 - DNA, 80 bp, synthetic construct; identical to SEQ ID NO: 20155
  source 1..80: mol_type = other DNA

SEQ ID NO: 104598 - DNA, 80 bp, synthetic construct
  source 1..80: mol_type = other DNA
aatcttagccactagtgctgtcacacgcagttcctcaaagaagcagggatggagagctaggacattccaagacctggact

SEQ ID NO: 104599 - DNA, 80 bp, synthetic construct
  source 1..80: mol_type = other DNA
tgtgaagtcagagaaacgtgggcaatgggaaagatggtctaactaaagaggaaagaagctgtgttaaccactctttgttg

SEQ ID NO: 104600 - DNA, 80 bp, synthetic construct
  source 1..80: mol_type = other DNA
catggtgaaactccatctctaccaaaaatacaaaaattagctgggcatggtggcggacacctgtaatctcagctacttgg

SEQ ID NO: 104601 - DNA, 80 bp, synthetic construct; identical to SEQ ID NO: 20156
  source 1..80: mol_type = other DNA

SEQ ID NO: 104602 - DNA, 80 bp, synthetic construct
  source 1..80: mol_type = other DNA
agaatgttgccacgtccaggagactctgatatgaggttaggcttagaccctatcagcctaatctggctctaaggatctcc

SEQ ID NO: 104603 - DNA, 80 bp, synthetic construct
  source 1..80: mol_type = other DNA
taaaacgtttccaaatgacacatttaattctgttccctaaattccagccatctaacccaggagactttttctcctctgca

SEQ ID NO: 104604 - DNA, 80 bp, synthetic construct
  source 1..80: mol_type = other DNA
tgatttgaggacttaccatgtgctggacgttattttaggcactggcaacagagtaataaccaaagcatttcttgttggaa

SEQ ID NO: 104605 - DNA, 80 bp, synthetic construct; identical to SEQ ID NO: 20157
  source 1..80: mol_type = other DNA

SEQ ID NO: 104606 - DNA, 80 bp, synthetic construct
  source 1..80: mol_type = other DNA
tgatgggtgacacatccattaagtcagggtatctggaacagtctaagaaaatctcagaggaaggattattaatttaggcc

SEQ ID NO: 104607 - DNA, 80 bp, synthetic construct
  source 1..80: mol_type = other DNA
aaattcaaggcctgaaaaaggagttggaacttagcttaaatgaggataaaatattggatgctccaagccagtgactcaat

SEQ ID NO: 104608 - DNA, 80 bp, synthetic construct
  source 1..80: mol_type = other DNA
gaattatccagccaaaaatgtcactggtgctgaagccaagaacactgccctaaaatgcactttagtgaacccctcatttt

SEQ ID NO: 104609 - DNA, 80 bp, synthetic construct
  source 1..80: mol_type = other DNA
aagggtgttagtatgttttcttctagcttaatttctaagattccatcttattacctgacctttccaatgtctgttatgtc

SEQ ID NO: 104610 - DNA, 80 bp, synthetic construct; identical to SEQ ID NO: 20158
  source 1..80: mol_type = other DNA

SEQ ID NO: 104611 - DNA, 80 bp, synthetic construct
  source 1..80: mol_type = other DNA
aaaaaaaatgggtaatgtccctccaagaagtgataccatgtcttttttccagtgctatatgttccacatgtatgttggag

SEQ ID NO: 104612 - DNA, 80 bp, synthetic construct
  source 1..80: mol_type = other DNA
atctagaatttgagccacatgttgctgaagttaatattcaaggtagggtaatgacgtcaagtgtttcctggcaaagccaa

SEQ ID NO: 104613 - DNA, 80 bp, synthetic construct; identical to SEQ ID NO: 20159
  source 1..80: mol_type = other DNA

SEQ ID NO: 104614 - DNA, 80 bp, synthetic construct
  source 1..80: mol_type = other DNA
ttcaccaaccttatgagaatggtgctcttattttatgcatgaagtaactgagccacaataagtctaaggaacttggccaa

SEQ ID NO: 104615 - DNA, 80 bp, synthetic construct
  source 1..80: mol_type = other DNA
ccgcttaacacatgtatcctggcttgaattaaatgtctgtaaatgtgacaatctcttttaagttccacagacatcaaatg

SEQ ID NO: 104616 - DNA, 80 bp, synthetic construct; identical to SEQ ID NO: 20160
  source 1..80: mol_type = other DNA

SEQ ID NO: 104617 - DNA, 80 bp, synthetic construct
  source 1..80: mol_type = other DNA
cctgtaatcccagctacttgggacgctgaggcaggaggatcgcttgagcccaggaggttgaggctgcagtgagctgtgat

SEQ ID NO: 104618 - DNA, 80 bp, synthetic construct
  source 1..80: mol_type = other DNA
ctggctaacacggtgaaaccctgtctctcctaaaaatacaaaaattagccaggtgtggcagtgtgtgcctgtagtcccag

SEQ ID NO: 104619 - DNA, 80 bp, synthetic construct
  source 1..80: mol_type = other DNA
ttcgtttaagtggtgatgtttcatttctacattagtacttgaaaaatctgattagtggagttttctgtacttataaatct

SEQ ID NO: 104620 - DNA, 80 bp, synthetic construct; identical to SEQ ID NO: 20161
  source 1..80: mol_type = other DNA

SEQ ID NO: 104621 - DNA, 80 bp, synthetic construct
  source 1..80: mol_type = other DNA
gactcagcttctttgttgtcctgggccctcgttttcctcactacctttatcaatagaatcatgaatgtgggaaggaggag

SEQ ID NO: 104622 - DNA, 80 bp, synthetic construct
  source 1..80: mol_type = other DNA
gaaaccaaagattcaatgacaagtaaatagatgattacagagcagtgtggtgagtcctttatgggagtaaagccctggag

SEQ ID NO: 104623 - DNA, 80 bp, synthetic construct
  source 1..80: mol_type = other DNA
tttgagcccatcaccacctgaaattatataccaagactgattttagggaagttgatgtgcaggtttttttcttagcagcc

SEQ ID NO: 104624 - DNA, 80 bp, synthetic construct; identical to SEQ ID NO: 20162
  source 1..80: mol_type = other DNA

SEQ ID NO: 104625 - DNA, 80 bp, synthetic construct
  source 1..80: mol_type = other DNA
ttcaggcattagccaccagatggatggtggcatagttagctgacctagggaacccagaggaagaacaggttcatcggtaa

SEQ ID NO: 104626 - DNA, 80 bp, synthetic construct
  source 1..80: mol_type = other DNA
tcttgattgtagttcctaaaatacagggtctcataaacatgcttcagatggcataaaacagcttacaactggcagggaag

SEQ ID NO: 104627 - DNA, 80 bp, synthetic construct
  source 1..80: mol_type = other DNA
aatctggtccctagtgccgaaagttgttctccattcacatccactggctaattctgtacctagcacagcacctggaagac

SEQ ID NO: 104628 - DNA, 80 bp, synthetic construct
  source 1..80: mol_type = other DNA
taactttagtcaatgtcatgaacaagagttgatcactaagcctggacattttcacctaggctagagaaaggaagagacgt

SEQ ID NO: 104629 - DNA, 80 bp, synthetic construct; identical to SEQ ID NO: 20163
  source 1..80: mol_type = other DNA

SEQ ID NO: 104630 - DNA, 80 bp, synthetic construct
  source 1..80: mol_type = other DNA
ccagtagacgccactggtccctgcccatctcagaatagagaggaagtttttgtttattgtttaaaaaataattgctgcag

SEQ ID NO: 104631 - DNA, 80 bp, synthetic construct
  source 1..80: mol_type = other DNA
tgtttctcattttagataggaattcttaggctgcttcctagggagatgcgagtctccgtttttcttcttacagatcttaa

SEQ ID NO: 104632 - DNA, 80 bp, synthetic construct
  source 1..80: mol_type = other DNA
aaacagaagagatgccgagtagcattatagggaaaaaaaattggcttaactatactcagtggaacttgatcagtaaatta

SEQ ID NO: 104633 - DNA, 80 bp, synthetic construct; identical to SEQ ID NO: 20164
  source 1..80: mol_type = other DNA

SEQ ID NO: 104634 - DNA, 80 bp, synthetic construct
  source 1..80: mol_type = other DNA
agaacaaaatgtgtgcattaaacagtgaggcacggaattactttcagatattagttgtggtatcttgatgtaaagttcct

SEQ ID NO: 104635 - DNA, 80 bp, synthetic construct
  source 1..80: mol_type = other DNA
ttatgtacaatgcatgttaaatgcctaaggtgtttaagctatttgaaattcctcttccactgtgcagattgttagtagtt

SEQ ID NO: 104636 - DNA, 80 bp, synthetic construct; identical to SEQ ID NO: 20165
  source 1..80: mol_type = other DNA

SEQ ID NO: 104637 - DNA, 80 bp, synthetic construct
  source 1..80: mol_type = other DNA
aagattattatgagacgttaaggtctggtatagttagttaggaaccatctaaattaatgtggacttctctattccgtgcg

SEQ ID NO: 104638 - DNA, 80 bp, synthetic construct
  source 1..80: mol_type = other DNA
cagtatgaagaccagctaaattaaactcagacccaatcacctctaaaaaccaaaaccctacccctctctctccctctctc

SEQ ID NO: 104639 - DNA, 80 bp, synthetic construct
  source 1..80: mol_type = other DNA
ctcagacaaaaaaaggaattctggaaagaaaaccattctggacactgtcataacacacatagatagattttcttctgaga

SEQ ID NO: 104640 - DNA, 80 bp, synthetic construct; identical to SEQ ID NO: 20166
  source 1..80: mol_type = other DNA

SEQ ID NO: 104641 - DNA, 80 bp, synthetic construct
  source 1..80: mol_type = other DNA
cagtttgcacttaaaaagaaaaaaaaaaaacgggtggtgtgtctcaggacaaaaggaggctcttctcattcagctaaatt

SEQ ID NO: 104642 - DNA, 80 bp, synthetic construct
  source 1..80: mol_type = other DNA
atacactttcaaaagaaaccattcattgcatgtttattatgcaagtttaaatgaacaaagaaaaccttcagaaacaagtt

SEQ ID NO: 104643 - DNA, 80 bp, synthetic construct
  source 1..80: mol_type = other DNA
gttttgggttttgctcattctttcagccacctgtgatcagttttgttgattaaggacttcttgtcaggccattttttaat

SEQ ID NO: 104644 - DNA, 80 bp, synthetic construct; identical to SEQ ID NO: 20167
  source 1..80: mol_type = other DNA

SEQ ID NO: 104645 - DNA, 80 bp, synthetic construct; identical to SEQ ID NO: 20168
  source 1..80: mol_type = other DNA

SEQ ID NO: 104646 - DNA, 80 bp, synthetic construct
  source 1..80: mol_type = other DNA
ctcccacccccaaccacaccgtctgcagccagccccaggcacctgtctcaaagctcccgggctgtccacacacacaaaaa

SEQ ID NO: 104647 - DNA, 80 bp, synthetic construct
  source 1..80: mol_type = other DNA
aaagcatggagatctacaaaaataggatttccacttggagaaatgtcgctgggacagttaaaccgtgtcccacactggac

SEQ ID NO: 104648 - DNA, 80 bp, synthetic construct
  source 1..80: mol_type = other DNA
cggcgaggtaggttaggagcagccagcccagagccggcaggtgagactgaggtggcctgggaggcatgcgcccggtggag

SEQ ID NO: 104649 - DNA, 80 bp, synthetic construct; identical to SEQ ID NO: 20169
  source 1..80: mol_type = other DNA

SEQ ID NO: 104650 - DNA, 80 bp, synthetic construct
  source 1..80: mol_type = other DNA
cactcccatgtctctgtgtctggagaggagctggagaccacacagaaaactcctccgcgtatggtccagagagccctggg

SEQ ID NO: 104651 - DNA, 80 bp, synthetic construct; identical to SEQ ID NO: 20170
  source 1..80: mol_type = other DNA

SEQ ID NO: 104652 - DNA, 80 bp, synthetic construct
  source 1..80: mol_type = other DNA
gggccggcagggaaaggcctgtctcccttaggctgggagcctgggtcccacggcctgtgtctggcctccgtgtgtgagga

SEQ ID NO: 104653 - DNA, 80 bp, synthetic construct
  source 1..80: mol_type = other DNA
ctcttgttcagggttaagaagagacagcgtgaattgctgcccatgtccatggaaaaatccttagttctttgctcaagtaa

SEQ ID NO: 104654 - DNA, 80 bp, synthetic construct
  source 1..80: mol_type = other DNA
ggccaactgctccggctgtccacgcggcgccacagaactctgcctggttgatccgcggggctgaggcccatttcttactc

SEQ ID NO: 104655 - DNA, 80 bp, synthetic construct
  source 1..80: mol_type = other DNA
cactgtggctgtagtcagacccccgcacctggaggttatcgctggtggctctagtgacactgtcataggagggtgggaag

SEQ ID NO: 104656 - DNA, 80 bp, synthetic construct; identical to SEQ ID NO: 20171
  source 1..80: mol_type = other DNA

SEQ ID NO: 104657 - DNA, 80 bp, synthetic construct
  source 1..80: mol_type = other DNA
tccatgcaatggatgcggtccccactcaccatgggcaggtccatgttgatgaggcttatctggttgggcttggcgatacg

SEQ ID NO: 104658 - DNA, 80 bp, synthetic construct
  source 1..80: mol_type = other DNA
aggatgatggcaatgtacatgttgaccacgatgaggaaggagatgatgatgtaggtggtgaagaagaggatgcccacggc

SEQ ID NO: 104659 - DNA, 80 bp, synthetic construct; identical to SEQ ID NO: 20172
  source 1..80: mol_type = other DNA

SEQ ID NO: 104660 - DNA, 80 bp, synthetic construct
  source 1..80: mol_type = other DNA
atgatgtccgagagcacagtgcctgtgggaaacaacagagactgtggctactggtggcacctctgtcttccagccagcat

SEQ ID NO: 104661 - DNA, 80 bp, synthetic construct
  source 1..80: mol_type = other DNA
ctttgcagggttccttctcagccccctcattccttaatcttcagtgtgtacctacacaatagagctgtcctaggcccatc

SEQ ID NO: 104662 - DNA, 80 bp, synthetic construct
  source 1..80: mol_type = other DNA
cagctccaccccagcccattgcatcttaagaagcccagatgatttatgtgcccatcgaagggcatgaaacactggcccag

SEQ ID NO: 104663 - DNA, 80 bp, synthetic construct
  source 1..80: mol_type = other DNA
tgactacctgggtttggagttttaaggggcatggatataaatcatggaataaagagtgaaataaacttgtcttatatggc

SEQ ID NO: 104664 - DNA, 80 bp, synthetic construct; identical to SEQ ID NO: 20173
  source 1..80: mol_type = other DNA

SEQ ID NO: 104665 - DNA, 80 bp, synthetic construct
  source 1..80: mol_type = other DNA
gttccattcctgctgctgacatcctgcattctctaaaactcctctccagtcccataaggcacgctctcaccctcatcctg

SEQ ID NO: 104666 - DNA, 80 bp, synthetic construct
  source 1..80: mol_type = other DNA
agagccccttgggggtagagttaaagagtttgggctccgagcacaagtgacaaaagaaaaaatataagtaaactggactt

SEQ ID NO: 104667 - DNA, 80 bp, synthetic construct
  source 1..80: mol_type = other DNA
aaggaagatatataaatgaccaacatgcacatggaaagatgtcctgcatcgttagtcatcagtcatttgcttttgcaaac

SEQ ID NO: 104668 - DNA, 80 bp, synthetic construct; identical to SEQ ID NO: 20174
  source 1..80: mol_type = other DNA

SEQ ID NO: 104669 - DNA, 80 bp, synthetic construct
  source 1..80: mol_type = other DNA
tataaaaaaaagatctgggctccgaggtcaaacagacatgggtcaggattgggtctctgcttctccctagctgcacaatc

SEQ ID NO: 104670 - DNA, 80 bp, synthetic construct
  source 1..80: mol_type = other DNA
catcctgagcttccttctccttcaacctaagtgcaggcagaattagcctccacagcacccactcccattcccagactcat

SEQ ID NO: 104671 - DNA, 80 bp, synthetic construct
  source 1..80: mol_type = other DNA
aggggagaaggggggtgagaaatgcactgaaaaaaattatgaaagaagctagggttgtacatggcattcagcagagaccc

SEQ ID NO: 104672 - DNA, 80 bp, synthetic construct; identical to SEQ ID NO: 20175
  source 1..80: mol_type = other DNA

SEQ ID NO: 104673 - DNA, 80 bp, synthetic construct
  source 1..80: mol_type = other DNA
gcctctcatcccagaccacccaccctcccactctaccctctagtgagcccaaagcccctgcaacactgccacagagagtg

SEQ ID NO: 104674 - DNA, 80 bp, synthetic construct
  source 1..80: mol_type = other DNA
attgtgcttcccttttagttcccacagtctgaaggctcaagggcaaatttaaacttcaaccttagtaattatgtcagtgc

SEQ ID NO: 104675 - DNA, 80 bp, synthetic construct
  source 1..80: mol_type = other DNA
ttatatatatatatatatatatatatatatatatatatatatatatatattttttttttttttttttttcttctgttctc

SEQ ID NO: 104676 - DNA, 80 bp, synthetic construct; identical to SEQ ID NO: 20176
  source 1..80: mol_type = other DNA

SEQ ID NO: 104677 - DNA, 80 bp, synthetic construct
  source 1..80: mol_type = other DNA
gatgctacatccttatcataccttcctccctatctctacgaggctgggacctctcttcatgatcagacatctgatagtgc

SEQ ID NO: 104678 - DNA, 80 bp, synthetic construct
  source 1..80: mol_type = other DNA
gcttcttcatggcattgtagtacttcttctgctcctctgtcatgaagatgtcctggccccctaagtgcaaagagaaggca

SEQ ID NO: 104679 - DNA, 80 bp, synthetic construct
  source 1..80: mol_type = other DNA
ggggccctgtcccttttcaccttgagatctctctggctttatgacctgcaaatccagtatccacccccctacccttttct

SEQ ID NO: 104680 - DNA, 80 bp, synthetic construct
  source 1..80: mol_type = other DNA
cagcttctcccaggagtctcatctcttaggtggattagggcaggcatggggcctcccaccaaagccccttcttacgttct

SEQ ID NO: 104681 - DNA, 80 bp, synthetic construct; identical to SEQ ID NO: 20177
  source 1..80: mol_type = other DNA

SEQ ID NO: 104682 - DNA, 80 bp, synthetic construct
  source 1..80: mol_type = other DNA
tgaagaaagacccaaagatgatgaaaatgacaaaatagatgtacatgtagaggttgtattcccactgaggctgctcttca

SEQ ID NO: 104683 - DNA, 80 bp, synthetic construct
  source 1..80: mol_type = other DNA
ctgtgggccagaggtgggtagggatagaggtgagaggagtggatggtggcaggtgaggacagcagacatgctgagctcag

SEQ ID NO: 104684 - DNA, 80 bp, synthetic construct
  source 1..80: mol_type = other DNA
cctggggtaaaagtcagtaaactacagtgagtttaatttgaaagacatttgagaattctgggacttcttaggagaccaag

SEQ ID NO: 104685 - DNA, 80 bp, synthetic construct; identical to SEQ ID NO: 20178
  source 1..80: mol_type = other DNA

SEQ ID NO: 104686 - DNA, 80 bp, synthetic construct
  source 1..80: mol_type = other DNA
atgccccaagaaggccatgcagcagggaataagcttcttgattgaggccgagagtctgagggggcttgcaggaggtctgc

SEQ ID NO: 104687 - DNA, 80 bp, synthetic construct
  source 1..80: mol_type = other DNA
catggactttcaagggaagttcccgaagaatctcaaccttcccttgtacttaagggggttcttttgtcaatggtgtgttg

SEQ ID NO: 104688 - DNA, 80 bp, synthetic construct; identical to SEQ ID NO: 20179
  source 1..80: mol_type = other DNA

SEQ ID NO: 104689 - DNA, 80 bp, synthetic construct
  source 1..80: mol_type = other DNA
cacaccaagggagtaaagagggaggctgaaccagagggggccctagtgctggtggcattgtctgccctagtctgggctgc

SEQ ID NO: 104690 - DNA, 80 bp, synthetic construct
  source 1..80: mol_type = other DNA
tcagctcactgcaacctctgcctcccgagttcaagtgattctcctgcctcagcctcctgaatagctgggattacaggcgt

SEQ ID NO: 104691 - DNA, 80 bp, synthetic construct
  source 1..80: mol_type = other DNA
ttcctttctaagcacaagctcaggtacacaaacttcctgtgtcgaagaattcttatgaggcaggtagggcagaaggggaa

SEQ ID NO: 104692 - DNA, 80 bp, synthetic construct; identical to SEQ ID NO: 20180
  source 1..80: mol_type = other DNA

SEQ ID NO: 104693 - DNA, 80 bp, synthetic construct
  source 1..80: mol_type = other DNA
acagcaagacaagcaagttgcagctctatgcattgtggttctattgcattggtcaaggctaatggtaggttaattttatg

SEQ ID NO: 104694 - DNA, 80 bp, synthetic construct
  source 1..80: mol_type = other DNA
agtgcagtggtgagatctcagctcacagcaagctccacctcccgggttcacgccattctcctgcctcagcctcccgagta

SEQ ID NO: 104695 - DNA, 80 bp, synthetic construct
  source 1..80: mol_type = other DNA
tgcgtctggctggaaatatgttcttttaaacaacacaagagctaacactatattttataacagagggtggccacagtcac

SEQ ID NO: 104696 - DNA, 80 bp, synthetic construct; identical to SEQ ID NO: 20181
  source 1..80: mol_type = other DNA

SEQ ID NO: 104697 - DNA, 80 bp, synthetic construct
  source 1..80: mol_type = other DNA
cacgttgtcaaagttgactttcaccttggtccagtacaattctccggtcaagttcaaggactcacactggctcttgttgt

SEQ ID NO: 104698 - DNA, 80 bp, synthetic construct
  source 1..80: mol_type = other DNA
attgaccaccacctcaagtggacagagaagtggctcagttcctgggggtgcccagagcacatgcccttttcaagaccccc

SEQ ID NO: 104699 - DNA, 80 bp, synthetic construct
  source 1..80: mol_type = other DNA
ttcccttcttggccctgccctgaatctgtgttctttaaaatctgattttcaccaaggtgtgtgctgattgaggataccag

SEQ ID NO: 104700 - DNA, 80 bp, synthetic construct; identical to SEQ ID NO: 20182
  source 1..80: mol_type = other DNA

SEQ ID NO: 104701 - DNA, 80 bp, synthetic construct
  source 1..80: mol_type = other DNA
ggaggtgaagctggtgtggactgtgtggtgtgggccagatgccaggttgggggatgctgttccccagcaggcacgctgaa

SEQ ID NO: 104702 - DNA, 80 bp, synthetic construct
  source 1..80: mol_type = other DNA
caaatgtccttgctcccaaagagacatttaactctgaacattatcttgtggatggtttcccaccaggaataagctatgtg

SEQ ID NO: 104703 - DNA, 80 bp, synthetic construct
  source 1..80: mol_type = other DNA
gggtcagtgagagacaaacaaacatgtcttctgaagccacacagaactggtatgttttgttaaaaaaaatatcccacgca

SEQ ID NO: 104704 - DNA, 80 bp, synthetic construct; identical to SEQ ID NO: 20183
  source 1..80: mol_type = other DNA

SEQ ID NO: 104705 - DNA, 80 bp, synthetic construct
  source 1..80: mol_type = other DNA
tgtctgccaggaggcagggcatgcagaggggcacacagagtgggcacacagagtgggcacacagagatgcagccctgcag

SEQ ID NO: 104706 - DNA, 80 bp, synthetic construct
  source 1..80: mol_type = other DNA
tgcctagcctcagggtgcctccatgcccagctgtgcctctcctggaggttctgggccatgctcctaccaagtcagcctcg

SEQ ID NO: 104707 - DNA, 80 bp, synthetic construct
  source 1..80: mol_type = other DNA
tgcacgcagcgtccgcagtgacttgatggggcccatctcggcaaagcccagggtgttggccaccaggctgaccagagaga

SEQ ID NO: 104708 - DNA, 80 bp, synthetic construct
  source 1..80: mol_type = other DNA
aggccagctctgcactgggccaggcttcccagagcccaagctggggcaagcccaagagtatcctggcttctgggccttta

SEQ ID NO: 104709 - DNA, 80 bp, synthetic construct; identical to SEQ ID NO: 20184
  source 1..80: mol_type = other DNA

SEQ ID NO: 104710 - DNA, 80 bp, synthetic construct
  source 1..80: mol_type = other DNA
gtggattttatccttctaaagctccatgggcatccactcccttcttacttcaccgctggcctgtgatcacaggccaaaaa

SEQ ID NO: 104711 - DNA, 80 bp, synthetic construct
  source 1..80: mol_type = other DNA
aggaagacacgccagactgatttctgtgttgcccccactcacccctcaaggatgctgggctattggcccccaatcctgga

SEQ ID NO: 104712 - DNA, 80 bp, synthetic construct; identical to SEQ ID NO: 20185
  source 1..80: mol_type = other DNA

SEQ ID NO: 104713 - DNA, 80 bp, synthetic construct
  source 1..80: mol_type = other DNA
ccttccaattccgcccccctacccccatttcattctaaatcaaaggccatattttttcaaaggcagcaatctggctgcat

SEQ ID NO: 104714 - DNA, 80 bp, synthetic construct
  source 1..80: mol_type = other DNA
ccaacttcaaacccgctcaaatgtgaccaaagtgcgcctactctgatcatcctatttaaaagtggtaacctgcaccttcc

SEQ ID NO: 104715 - DNA, 80 bp, synthetic construct
  source 1..80: mol_type = other DNA
tattgaaaaataatgcagaattcatcttggaaacatccttccctagactctgaggcctgagacaaactttcccatgaagc

SEQ ID NO: 104716 - DNA, 80 bp, synthetic construct; identical to SEQ ID NO: 20186
  source 1..80: mol_type = other DNA

SEQ ID NO: 104717 - DNA, 80 bp, synthetic construct
  source 1..80: mol_type = other DNA
tgtgtctagagctctccttgccccccttccaccccagcaccccctcaccccagcattagcatcctcttggccacctgggg

SEQ ID NO: 104718 - DNA, 80 bp, synthetic construct
  source 1..80: mol_type = other DNA
tgagcctctgagtggggtatggagactgcacaggcctgagcctgttctgtaaccacaggaaggatagctcctgctggtat

SEQ ID NO: 104719 - DNA, 80 bp, synthetic construct
  source 1..80: mol_type = other DNA
gtgcaaacccaggcctgccctgcaccgacccgtttctctctgcttggctactctccctcttgactgacgtcaggccccct

SEQ ID NO: 104720 - DNA, 80 bp, synthetic construct; identical to SEQ ID NO: 20187
  source 1..80: mol_type = other DNA

SEQ ID NO: 104721 - DNA, 80 bp, synthetic construct
  source 1..80: mol_type = other DNA
atctgtctagtgggcctgatggacacttacagtctgctgtggtgtgtgctagagcacaagcttgtctgctcacttccctt

SEQ ID NO: 104722 - DNA, 80 bp, synthetic construct
  source 1..80: mol_type = other DNA
tgagcctgggaacctgaggacaaggcctgggtcactcagacttacgtcctccttcctctctgcctgccccacagcactgc

SEQ ID NO: 104723 - DNA, 80 bp, synthetic construct
  source 1..80: mol_type = other DNA
cttgaagccgtaggccacccacttgagcagcatctccagcacgaagacatatgtgaacatcttgtcggcatactcaagca

SEQ ID NO: 104724 - DNA, 80 bp, synthetic construct
  source 1..80: mol_type = other DNA
gctctgttgcccaggctggagtgcagtggtgcaatcttggctcactgcaacctccgcctcccgggttcaagtgattctcc

SEQ ID NO: 104725 - DNA, 80 bp, synthetic construct; identical to SEQ ID NO: 20188
  source 1..80: mol_type = other DNA

SEQ ID NO: 104726 - DNA, 80 bp, synthetic construct
  source 1..80: mol_type = other DNA
attttaacaaggagagagggtatgcaggctcagctcacagctttctgctggaaacaacataaaatatttttgttttcact

SEQ ID NO: 104727 - DNA, 80 bp, synthetic construct
  source 1..80: mol_type = other DNA
actatattaaaagtcatttgtagatgtggtgtttaggaacaacaggtgtagataaagtcaaatgtcctgcaattctcagg

SEQ ID NO: 104728 - DNA, 80 bp, synthetic construct
  source 1..80: mol_type = other DNA
tacctccagcctactgatttgttcctgtttctctctctgtccagactgtgctatgaggctcctgtctaggcaactgaaca

SEQ ID NO: 104729 - DNA, 80 bp, synthetic construct; identical to SEQ ID NO: 20189
  source 1..80: mol_type = other DNA

SEQ ID NO: 104730 - DNA, 80 bp, synthetic construct
  source 1..80: mol_type = other DNA
tttgacagtgtgtatgtgtgtgcacatacacacaatcaccacaattttatgagacacactaaatatttgccttgaaatta

SEQ ID NO: 104731 - DNA, 80 bp, synthetic construct
  source 1..80: mol_type = other DNA
ttctttacagtttatccctagtggaaataaagttgcagtggacaggggattgttgaggataaattgggttgccagggcaa

SEQ ID NO: 104732 - DNA, 80 bp, synthetic construct
  source 1..80: mol_type = other DNA
gggctcttctctaccaccccaccgacattgctgtcatttctcctttttcacttttcccagcctaatgaaagaaacttgta

SEQ ID NO: 104733 - DNA, 80 bp, synthetic construct; identical to SEQ ID NO: 20190
  source 1..80: mol_type = other DNA

SEQ ID NO: 104734 - DNA, 80 bp, synthetic construct
  source 1..80: mol_type = other DNA
aaaattaaatatagtttggtaaggagtaaatatccattttaatgctttttttcagaatgtagctcatcaaatgccccaac

SEQ ID NO: 104735 - DNA, 80 bp, synthetic construct
  source 1..80: mol_type = other DNA
aaataattttcaagataaactttaccaatgtttcgtcatatttcctcagaaatgttgaaagcttgttatcgcattgaatc

SEQ ID NO: 104736 - DNA, 80 bp, synthetic construct; identical to SEQ ID NO: 20191
  source 1..80: mol_type = other DNA

SEQ ID NO: 104737 - DNA, 80 bp, synthetic construct
  source 1..80: mol_type = other DNA
ttcccaacttttatatcatgtgttcaattttcttaattaattacactggctagtaattcaagactattattaaataatga

SEQ ID NO: 104738 - DNA, 80 bp, synthetic construct
  source 1..80: mol_type = other DNA
attcagtagtagaaaacgtattttatttctattcttaccagagttctgaaaatcaggcattcactgaaataattatatgg

SEQ ID NO: 104739 - DNA, 80 bp, synthetic construct
  source 1..80: mol_type = other DNA
cagaagtatggagtatgaagcataaaaactggcctaggttttccttttggtatacttgaggttttaaaaatcagcactat

SEQ ID NO: 104740 - DNA, 80 bp, synthetic construct
  source 1..80: mol_type = other DNA
accaggcatggtggcgcatgcctgtaatcccagctactcaagaggctgaggcaggagaatccttgaacccgggaggcgga

SEQ ID NO: 104741 - DNA, 80 bp, synthetic construct; identical to SEQ ID NO: 20192
  source 1..80: mol_type = other DNA

SEQ ID NO: 104742 - DNA, 80 bp, synthetic construct
  source 1..80: mol_type = other DNA
ggttattttattaattacttgcctaggtttctttaagattattttgttatatttttaatttcttgaattaaataatttat

SEQ ID NO: 104743 - DNA, 80 bp, synthetic construct
  source 1..80: mol_type = other DNA
gatctcacgtggacagaattaatggaatcacaatctttgatttatagcacactatcatcaccattggtgcatgagtggcc

SEQ ID NO: 104744 - DNA, 80 bp, synthetic construct
  source 1..80: mol_type = other DNA
aggctggagtgcagtggcgcgatctcggctcactgcaagctccgcctcccaggttcacgccattctcctgcctcagcctc

SEQ ID NO: 104745 - DNA, 80 bp, synthetic construct; identical to SEQ ID NO: 20193
  source 1..80: mol_type = other DNA

SEQ ID NO: 104746 - DNA, 80 bp, synthetic construct
  source 1..80: mol_type = other DNA
atttagatctctcattgtcttgttctttccacttgaatgtcaagaactaatagaaatatggcaaagtttcccagtactag

SEQ ID NO: 104747 - DNA, 80 bp, synthetic construct
  source 1..80: mol_type = other DNA
aatatgcacttatataggtgcatattatatattataatatatacttatatttatatataggtttatataattgtatataa

SEQ ID NO: 104748 - DNA, 80 bp, synthetic construct
  source 1..80: mol_type = other DNA
tatttgtacatatatatttatatactttgtataatctatatttatgtattttgtataaatctatattcttttatagattt

SEQ ID NO: 104749 - DNA, 80 bp, synthetic construct; identical to SEQ ID NO: 20194
  source 1..80: mol_type = other DNA

SEQ ID NO: 104750 - DNA, 80 bp, synthetic construct
  source 1..80: mol_type = other DNA
catctcaagcttttaacattgaattcaacaaacaaaaagcaccctgaatttgttgtcataatttgcatttgcctgatcta

SEQ ID NO: 104751 - DNA, 80 bp, synthetic construct
  source 1..80: mol_type = other DNA
aggcattggtgtgaacagggctcactgcagccttgacctctcaggctcaagcaatcctctcccctcagcctcctgagtag

SEQ ID NO: 104752 - DNA, 80 bp, synthetic construct
  source 1..80: mol_type = other DNA
ccatgcctggtggcttttaatatttctgagtcgcattgttttaggtttgtcatttgaaagcacatggctgaaggtttttt

SEQ ID NO: 104753 - DNA, 80 bp, synthetic construct
  source 1..80: mol_type = other DNA
cttgcctctattatattattttgttttctgattttgttttcttgttgcttctttttccttctaccttttgctgtgagatc

SEQ ID NO: 104754 - DNA, 80 bp, synthetic construct; identical to SEQ ID NO: 20195
  source 1..80: mol_type = other DNA

SEQ ID NO: 104755 - DNA, 80 bp, synthetic construct
  source 1..80: mol_type = other DNA
aacaaaactagttaacatattgtcaaaccatctttctctgaagcctacagagatttggctctagctgccaatggtaaaac

SEQ ID NO: 104756 - DNA, 80 bp, synthetic construct
  source 1..80: mol_type = other DNA
cttggatcaaagtgccctttctctcactctgcagtctaaagcattctctgttagttgctcatctatggggttctcacctc

SEQ ID NO: 104757 - DNA, 80 bp, synthetic construct; identical to SEQ ID NO: 20196
  source 1..80: mol_type = other DNA

SEQ ID NO: 104758 - DNA, 80 bp, synthetic construct
  source 1..80: mol_type = other DNA
cccctccagggctgttccatctcttcctagaagtgcttggagagattagagcagcatgcctgggagccagatggggcaac

SEQ ID NO: 104759 - DNA, 80 bp, synthetic construct
  source 1..80: mol_type = other DNA
ctgtagctcccacatggctgaatacatagagctagatacaaggagggtttttagaagactgactgaacaaatgagaagtc

SEQ ID NO: 104760 - DNA, 80 bp, synthetic construct
  source 1..80: mol_type = other DNA
ttacttaatgcttctacaaagagttgtcatggggattacgcatcatcatgtgtgaactatagggcgcagcctccagcctg

SEQ ID NO: 104761 - DNA, 80 bp, synthetic construct
  source 1..80: mol_type = other DNA
gaacaaagacaaaggcctggacacatgccctctgtgagcccttcctgctctggcctccatacgtgccgtggggttgagag

SEQ ID NO: 104762 - DNA, 80 bp, synthetic construct; identical to SEQ ID NO: 20197
  source 1..80: mol_type = other DNA

SEQ ID NO: 104763 - DNA, 80 bp, synthetic construct
  source 1..80: mol_type = other DNA
gactgagagaaagagctacgatgatgggggtggcgaacagggcaatatggtgagcagggccgtgtgagcgagggccgtgg

SEQ ID NO: 104764 - DNA, 80 bp, synthetic construct
  source 1..80: mol_type = other DNA
ccctgggaaaatggtaggaactcctgggcattccctgggtcttctccatgtttgtagtttctgagccttgggaagggcag

SEQ ID NO: 104765 - DNA, 80 bp, synthetic construct
  source 1..80: mol_type = other DNA
cctgcctcagcctcctgagtagctgggattacaggtgcctgccagcgcgcccaactaattttttgtgtttttagtagaga

SEQ ID NO: 104766 - DNA, 80 bp, synthetic construct; identical to SEQ ID NO: 20198
  source 1..80: mol_type = other DNA

SEQ ID NO: 104767 - DNA, 80 bp, synthetic construct
  source 1..80: mol_type = other DNA
ggcagatggaggaacccccagggtcacagaggaatggaggaggtgggcagatatctaaggcagggtgttggtgccacgtg

SEQ ID NO: 104768 - DNA, 80 bp, synthetic construct
  source 1..80: mol_type = other DNA
ggtcatgtctgctgtgctgccctcggagcaactgtcctctggggtctatggacaggggtgtgggacagggtgggaaaggg

SEQ ID NO: 104769 - DNA, 80 bp, synthetic construct; identical to SEQ ID NO: 20199
  source 1..80: mol_type = other DNA

SEQ ID NO: 104770 - DNA, 80 bp, synthetic construct
  source 1..80: mol_type = other DNA
acattttgcgcagttcccgtgggttctggtgtgctggacagagcccggagactgagaaggtgatggagccctccacttcc

SEQ ID NO: 104771 - DNA, 80 bp, synthetic construct
  source 1..80: mol_type = other DNA
attccactacataagaccactgcacccattcccagccacttgaatgctagctgcttagctggccctcctccagaaaatca

SEQ ID NO: 104772 - DNA, 80 bp, synthetic construct
  source 1..80: mol_type = other DNA
ggaaagcctttccgtagcttccttctttgcttcatcctgtttctcttactttctcctgagaacacccctcaacaagtcat

SEQ ID NO: 104773 - DNA, 80 bp, synthetic construct; identical to SEQ ID NO: 20200
  source 1..80: mol_type = other DNA

SEQ ID NO: 104774 - DNA, 80 bp, synthetic construct
  source 1..80: mol_type = other DNA
ctcctcctagctcagctgggggatgaaaggagttgggtgatgaaaggggcaggccagaggagagcagcatgcttattttt

SEQ ID NO: 104775 - DNA, 80 bp, synthetic construct
  source 1..80: mol_type = other DNA
gaagacttataaaattcattcaaaggttagcatccgtgtgagagagccacttctctcccatggcattttgcctctctcct

SEQ ID NO: 104776 - DNA, 80 bp, synthetic construct
  source 1..80: mol_type = other DNA
aagtgctggacggagtgaggtcaagctgcaggacagtggccaccaagcactctgaacacgtgccctccaccttccgtggg

SEQ ID NO: 104777 - DNA, 80 bp, synthetic construct; identical to SEQ ID NO: 20201
  source 1..80: mol_type = other DNA

SEQ ID NO: 104778 - DNA, 80 bp, synthetic construct
  source 1..80: mol_type = other DNA
agggatgcccaccctcccctctgcagactggtcttccacgctgcctgtgacagtggctgtggctcccaacagcaaatgca

SEQ ID NO: 104779 - DNA, 80 bp, synthetic construct
  source 1..80: mol_type = other DNA
aggcagtcgctgacacctggctccaggtcctggaatccggaggggcctctgggccaccggacacaggctgggattcctgc

SEQ ID NO: 104780 - DNA, 80 bp, synthetic construct
  source 1..80: mol_type = other DNA
ctgagcaggcaggtgggaggctcctggtaggtccaagcaaagggcctagagacaggaagcccctggccggcctggcataa

SEQ ID NO: 104781 - DNA, 80 bp, synthetic construct; identical to SEQ ID NO: 20202
  source 1..80: mol_type = other DNA

SEQ ID NO: 104782 - DNA, 80 bp, synthetic construct
  source 1..80: mol_type = other DNA
gagccttagatcaagttccacacatggggagcagctgctctccacagccaggcccagccagtgcaggcccagaggaagca

SEQ ID NO: 104783 - DNA, 80 bp, synthetic construct
  source 1..80: mol_type = other DNA
aataacaggttgcgagataagatagtgctgtccctgacacctcagtcttagggatgcttatttttaaatctcagaatgag

SEQ ID NO: 104784 - DNA, 80 bp, synthetic construct
  source 1..80: mol_type = other DNA
caagtctctcttgccatgcctccgtttccctgtctgtacaatgagctccccatgcccagccagggcatgagtggtggata

SEQ ID NO: 104785 - DNA, 80 bp, synthetic construct; identical to SEQ ID NO: 20203
  source 1..80: mol_type = other DNA

SEQ ID NO: 104786 - DNA, 80 bp, synthetic construct
  source 1..80: mol_type = other DNA
ggaggcaccttctccgtctctgggggtggcggggagtagggggtggcaatgcagctgggcagctggccctgggcggcaag

SEQ ID NO: 104787 - DNA, 80 bp, synthetic construct
  source 1..80: mol_type = other DNA
gagctgagcagcaaggccaggaagagattcaggacctgtcgagataatgggtcaggctcaccaaggcactgcaccatgcc

SEQ ID NO: 104788 - DNA, 80 bp, synthetic construct
  source 1..80: mol_type = other DNA
aaatttgaatccctctttccaagggcccagacacagtctgaattgaggatgtcgtgtcctggctcaggttcaatgggaga

SEQ ID NO: 104789 - DNA, 80 bp, synthetic construct
  source 1..80: mol_type = other DNA
aggtctccttcctgggaagtgtgagtccagggacaagacagaatcccaccgagaagccacacagagcttttgggactttg

SEQ ID NO: 104790 - DNA, 80 bp, synthetic construct; identical to SEQ ID NO: 20204
  source 1..80: mol_type = other DNA

SEQ ID NO: 104791 - DNA, 80 bp, synthetic construct
  source 1..80: mol_type = other DNA
agaattgcttgtcgttaagccctcctgcaagtgtgaagctttagcttttgtttaaaaagaaggcctttgatgtgtgacaa

SEQ ID NO: 104792 - DNA, 80 bp, synthetic construct
  source 1..80: mol_type = other DNA
tggtgtgtgagggtgggtgcacagttctttttggaaatccactctgagactctgttccggtttctcaagagcctctaaaa

SEQ ID NO: 104793 - DNA, 80 bp, synthetic construct; identical to SEQ ID NO: 20205
  source 1..80: mol_type = other DNA

SEQ ID NO: 104794 - DNA, 80 bp, synthetic construct
  source 1..80: mol_type = other DNA
ccacagcctcactcacaccaggccctgcatcccccaacctccaggagtcctgggcctaggctgggagtagggcgggtggt

SEQ ID NO: 104795 - DNA, 80 bp, synthetic construct
  source 1..80: mol_type = other DNA
cctcccacgcctggcagcggcccaattccttaggcggctggggagggggctgtgtgggctggcattagctccctcctcca

SEQ ID NO: 104796 - DNA, 80 bp, synthetic construct
  source 1..80: mol_type = other DNA
aacccttcaccccaagggatagctagtttggggggacataagggggagttgggggccagccaaagagcagggttctagtg

SEQ ID NO: 104797 - DNA, 80 bp, synthetic construct
  source 1..80: mol_type = other DNA
tctggaatctatagcccatagtacttgccccacagcagcctgaaaaagtgaatgtaaaacctctctgtgagctgatgtga

SEQ ID NO: 104798 - DNA, 80 bp, synthetic construct; identical to SEQ ID NO: 20206
  source 1..80: mol_type = other DNA

SEQ ID NO: 104799 - DNA, 80 bp, synthetic construct
  source 1..80: mol_type = other DNA
tttgctcatcctgttccttccctcttcagcattgcctgtttatcaggtcagctccaaaatctcttccagaaagatttcct

SEQ ID NO: 104800 - DNA, 80 bp, synthetic construct
  source 1..80: mol_type = other DNA
ttgcctctgtattcccaacagcatgtggcacaatgttttccatgcaataagggcttagaaaatgtttaagataaattgaa

SEQ ID NO: 104801 - DNA, 80 bp, synthetic construct; identical to SEQ ID NO: 20207
  source 1..80: mol_type = other DNA

SEQ ID NO: 104802 - DNA, 80 bp, synthetic construct
  source 1..80: mol_type = other DNA
aattagtcaggcgtggtacatgcctgtgatcccagctactagggaggctgaggcagaagaatcacttgaacctgtgaggc

SEQ ID NO: 104803 - DNA, 80 bp, synthetic construct
  source 1..80: mol_type = other DNA
tggaattggtgaatgagtgaatggtgagttgatagatgggaggtggatgaatgagtagaggagtgaatggttgggtgagt

SEQ ID NO: 104804 - DNA, 80 bp, synthetic construct
  source 1..80: mol_type = other DNA
gtgggttggtggatgaatgacaaggtgaatgagtggataaatggatgggtggtttggtaactggggaagaatctactgat

SEQ ID NO: 104805 - DNA, 80 bp, synthetic construct; identical to SEQ ID NO: 20208
  source 1..80: mol_type = other DNA

SEQ ID NO: 104806 - DNA, 80 bp, synthetic construct
  source 1..80: mol_type = other DNA
aatgactgccccgacacctccatgcagtcccacatggtctcgatccactctccacagaggatgcggaagatgatgaggaa

SEQ ID NO: 104807 - DNA, 80 bp, synthetic construct
  source 1..80: mol_type = other DNA
ttcccgatgatcttgatgagtgtgttcagggtgggccatgatttggccagcttgaagacccgcagctggggaaggaggaa

SEQ ID NO: 104808 - DNA, 80 bp, synthetic construct
  source 1..80: mol_type = other DNA
cctgagggcagcttcactgggcactgctctgggagtcaggtcaacagctccagcctcaccttcccaactcagcccttctc

SEQ ID NO: 104809 - DNA, 80 bp, synthetic construct; identical to SEQ ID NO: 20209
  source 1..80: mol_type = other DNA

SEQ ID NO: 104810 - DNA, 80 bp, synthetic construct
  source 1..80: mol_type = other DNA
cccccaccgtcctgccttcctacacactcccccgaccccactcccatccactgtatgtgcagcaacccacagtgctcagg

SEQ ID NO: 104811 - DNA, 80 bp, synthetic construct
  source 1..80: mol_type = other DNA
tgtgtgcattaatattttaaagatgctgattcagaaagcagcaggcagaacctcggatgagcagttagcagcccagctcc

SEQ ID NO: 104812 - DNA, 80 bp, synthetic construct
  source 1..80: mol_type = other DNA
cactgtggaccacaaagggctttgcaaatcatcctgatggccaccacaattgctcctctggaagaatgtctcctgccttt

SEQ ID NO: 104813 - DNA, 80 bp, synthetic construct; identical to SEQ ID NO: 20210
  source 1..80: mol_type = other DNA

SEQ ID NO: 104814 - DNA, 80 bp, synthetic construct
  source 1..80: mol_type = other DNA
gccagcaggggcacctgcctcttgactcttgctgtggcaggggctccctccagggctgccagctctgattgcgcccaggc

SEQ ID NO: 104815 - DNA, 80 bp, synthetic construct
  source 1..80: mol_type = other DNA
cagctctagggggcacctgcgatggacagtgacatgacctcgcactagacttctgatccgtgtgtccacaggaagggctt

SEQ ID NO: 104816 - DNA, 80 bp, synthetic construct
  source 1..80: mol_type = other DNA
ggctacgtgccaagtgctggtcacaacactttgcacatgttgtttcttttgattcatccaacaaccccatgaggaagtat

SEQ ID NO: 104817 - DNA, 80 bp, synthetic construct; identical to SEQ ID NO: 20211
  source 1..80: mol_type = other DNA

SEQ ID NO: 104818 - DNA, 80 bp, synthetic construct
  source 1..80: mol_type = other DNA
ggagagaatgttctgtgacggtgtggatggcaggaagtcagggtcctgtacgcagggcctcttgaccatgctgaggagtt

SEQ ID NO: 104819 - DNA, 80 bp, synthetic construct
  source 1..80: mol_type = other DNA
tggcaatcaggtggggaggtcactctggtctgggcacccgccctgacggggctctgtgctaggagaggcatttgctggtc

SEQ ID NO: 104820 - DNA, 80 bp, synthetic construct
  source 1..80: mol_type = other DNA
tgacttcaggggtccctttagtgcttgtgcccagagggaactgttcctccctcagccgggtcttgggaaagggagggacc

SEQ ID NO: 104821 - DNA, 80 bp, synthetic construct
  source 1..80: mol_type = other DNA
ccctcctcggggcctttgcacttgctgctgctccctttccccgggtcatgcctttccccagccgcataactcactccctt

SEQ ID NO: 104822 - DNA, 80 bp, synthetic construct; identical to SEQ ID NO: 20212
  source 1..80: mol_type = other DNA

SEQ ID NO: 104823 - DNA, 80 bp, synthetic construct
  source 1..80: mol_type = other DNA
tacaggtggggcccgggtagcgcctcacttggacccccacttttggtcttccccagcactgccggggtgcaccagggtgg

SEQ ID NO: 104824 - DNA, 80 bp, synthetic construct
  source 1..80: mol_type = other DNA
gaatgcccttcggggaaatgataaaagaattttcagggatcaacagcatcacctggaagctctttggaaatgcagaaact

SEQ ID NO: 104825 - DNA, 80 bp, synthetic construct; identical to SEQ ID NO: 20213
  source 1..80: mol_type = other DNA

SEQ ID NO: 104826 - DNA, 80 bp, synthetic construct
  source 1..80: mol_type = other DNA
actctaatgtgcagctaagcttgagaagtacatacattttggtaacagacctcttccttccacaggctcatgccaggctt

SEQ ID NO: 104827 - DNA, 80 bp, synthetic construct
  source 1..80: mol_type = other DNA
ctccataggaggtttctaggagttacagctaatggctgtaaagtggatactctctatgacagggcgattattgttactgt

SEQ ID NO: 104828 - DNA, 80 bp, synthetic construct
  source 1..80: mol_type = other DNA
aggttcactgagcaatgagtgcaaatggccgctttccaggaattgggggaacttatggggaaccccaaattctctttgac

SEQ ID NO: 104829 - DNA, 80 bp, synthetic construct
  source 1..80: mol_type = other DNA
tttcttttttttttttacatttgtggcacattccactgtacagatgtgctataactggtttagccatttccctgtgatag

SEQ ID NO: 104830 - DNA, 80 bp, synthetic construct; identical to SEQ ID NO: 20214
  source 1..80: mol_type = other DNA

SEQ ID NO: 104831 - DNA, 80 bp, synthetic construct
  source 1..80: mol_type = other DNA
ctttatatattaaggatattacccttttgtctattagtactatttgtattgtcacaattttcctgatttgtcatttacct

SEQ ID NO: 104832 - DNA, 80 bp, synthetic construct
  source 1..80: mol_type = other DNA
aaaatagcaaatacttaaatagcatttgatgtatgccaggcactgttctagtgttttacatatactaaaccatttaaccc

SEQ ID NO: 104833 - DNA, 80 bp, synthetic construct
  source 1..80: mol_type = other DNA
atcatgtgccatcacagataaaccaggagccacccatagtactatattcattccaaggtaatcactatcccaaatttgat

SEQ ID NO: 104834 - DNA, 80 bp, synthetic construct
  source 1..80: mol_type = other DNA
gtttgagatttattgacacatgtataagtattcattctaatcgtgtacagtatttcattgtatgagtacaccacaattta

SEQ ID NO: 104835 - DNA, 80 bp, synthetic construct; identical to SEQ ID NO: 20215
  source 1..80: mol_type = other DNA

SEQ ID NO: 104836 - DNA, 80 bp, synthetic construct
  source 1..80: mol_type = other DNA
catttcctttgtccattgttgtggttctgtttttatcattttatcactatccctcttttcctattgatgtgtaactcttc

SEQ ID NO: 104837 - DNA, 80 bp, synthetic construct
  source 1..80: mol_type = other DNA
gctttttggattgttgaaggccttcccaatcccaagatcttaaagcttttttgcttgtttttattctaaaaactttaaag

SEQ ID NO: 104838 - DNA, 80 bp, synthetic construct; identical to SEQ ID NO: 20216
  source 1..80: mol_type = other DNA

SEQ ID NO: 104839 - DNA, 80 bp, synthetic construct
  source 1..80: mol_type = other DNA
agcctcctgagtagccagaactacaggtgcatgccaccacatccagctaatttttgtatttttagtagagacaggctttc

SEQ ID NO: 104840 - DNA, 80 bp, synthetic construct
  source 1..80: mol_type = other DNA
ggattgttctatttctgtggtctcaattctgtagcacaatctgtttttccacccctgcaccaatactataatatttttag

SEQ ID NO: 104841 - DNA, 80 bp, synthetic construct
  source 1..80: mol_type = other DNA
ttaatttgggaagaatttgtatccctacaatattcatactttcattcatgaaaatggtacatcgctctacttttatgtct

SEQ ID NO: 104842 - DNA, 80 bp, synthetic construct; identical to SEQ ID NO: 20217
  source 1..80: mol_type = other DNA

SEQ ID NO: 104843 - DNA, 80 bp, synthetic construct
  source 1..80: mol_type = other DNA
aatatgctatttgatgcgtacattgaaattttaatctcaatgtctatatttttcatttctggagattttatttggttctt

SEQ ID NO: 104844 - DNA, 80 bp, synthetic construct
  source 1..80: mol_type = other DNA
ccaagtgatcctgccacctcagcctcccaagtagctaggaccacaggtgcacaccaccacacccggctatttttgtgtat

SEQ ID NO: 104845 - DNA, 80 bp, synthetic construct
  source 1..80: mol_type = other DNA
ggccaattatgaacatttttatcatctctatcaagcagttctactatgtgacatttttaaggggatagcctgattgtgtc

SEQ ID NO: 104846 - DNA, 80 bp, synthetic construct
  source 1..80: mol_type = other DNA
ccttttaggggccccaagacatcattctaggatcactttctatgttaattttttagatgtaggttccaggactactcagg

SEQ ID NO: 104847 - DNA, 80 bp, synthetic construct; identical to SEQ ID NO: 20218
  source 1..80: mol_type = other DNA

SEQ ID NO: 104848 - DNA, 80 bp, synthetic construct
  source 1..80: mol_type = other DNA
tttactgctatggtttttaagcttctttttgtttttggcacttggggtttctgttaaagtagcccctcttatctacgggg

SEQ ID NO: 104849 - DNA, 80 bp, synthetic construct
  source 1..80: mol_type = other DNA
gcttctctttggcacatccgtattgccagcaacattactattctgctttggggaataatgattaagtaaaataagggtta

SEQ ID NO: 104850 - DNA, 80 bp, synthetic construct
  source 1..80: mol_type = other DNA
taacagagatagctagtaagtgactaatggataggttgcatatagagcgtggatacgctgaacaaagggacaattcatgt

SEQ ID NO: 104851 - DNA, 80 bp, synthetic construct; identical to SEQ ID NO: 20219
  source 1..80: mol_type = other DNA

SEQ ID NO: 104852 - DNA, 80 bp, synthetic construct
  source 1..80: mol_type = other DNA
cttctcctttgtggaatttgtcttcagagacatgcttagaaaggcttttcccatgctgattatttactcatgcttatttt

SEQ ID NO: 104853 - DNA, 80 bp, synthetic construct
  source 1..80: mol_type = other DNA
tagtacaatgcagttcagctacaacttgctgacccagtgaagccaccagtgctgttcatcacacctaacttgctgctcag

SEQ ID NO: 104854 - DNA, 80 bp, synthetic construct
  source 1..80: mol_type = other DNA
attacagcaagttgactcaaattggtgaaaaaatctgaataggccctgcagagaactacctagagtcctgggtttggaaa

SEQ ID NO: 104855 - DNA, 80 bp, synthetic construct
  source 1..80: mol_type = other DNA
cgatgatgatctcacaagctcctttttaaggccagtgggatcatggcaactctgccctgggatcctctaaagatgggctg

SEQ ID NO: 104856 - DNA, 80 bp, synthetic construct; identical to SEQ ID NO: 20220
  source 1..80: mol_type = other DNA

SEQ ID NO: 104857 - DNA, 80 bp, synthetic construct
  source 1..80: mol_type = other DNA
tatttattgggccaattactgagtaaactgcttgagatcagctagttagtaagagctgagtcagaattcaaatctggctc

SEQ ID NO: 104858 - DNA, 80 bp, synthetic construct
  source 1..80: mol_type = other DNA
gagaactacttccttctgcacgcattctcctccacctacaaattacaaaatctcaagtctccacacatttcaggtttacc

SEQ ID NO: 104859 - DNA, 80 bp, synthetic construct; identical to SEQ ID NO: 20221
  source 1..80: mol_type = other DNA

SEQ ID NO: 104860 - DNA, 80 bp, synthetic construct
  source 1..80: mol_type = other DNA
gtgctccagcgccatgaagagtgtgttgagtacgatgcacatagtgatggtgaggtcagtaaacgggtccatgaccacca

SEQ ID NO: 104861 - DNA, 80 bp, synthetic construct
  source 1..80: mol_type = other DNA
cagccaatgagttagtttgattctgttgactgagtcatatgtaactggaataccttccaggaaagatttatgacttgctc

SEQ ID NO: 104862 - DNA, 80 bp, synthetic construct
  source 1..80: mol_type = other DNA
agattatcaggacaaacgtacaactgcttaagacaacagtcccacatagacctggggacactcaggggaggacaggctga

SEQ ID NO: 104863 - DNA, 80 bp, synthetic construct
  source 1..80: mol_type = other DNA
agggatgtggagttgcctagggcaggaatggctgggaaagatgtaggatgcctggaatagtctgaagtagatatgggaat

SEQ ID NO: 104864 - DNA, 80 bp, synthetic construct; identical to SEQ ID NO: 20222
  source 1..80: mol_type = other DNA

SEQ ID NO: 104865 - DNA, 80 bp, synthetic construct
  source 1..80: mol_type = other DNA
tcctcgaagccatctacacacggagcctgggaggtcagcatctggggcccgcctggctcctccgatggcgtggtctgagt

SEQ ID NO: 104866 - DNA, 80 bp, synthetic construct
  source 1..80: mol_type = other DNA
tccctcccagttaagaactccctccacccctcctcccaatcactgtctccttcattctcctttcttcttcactgcctctc

SEQ ID NO: 104867 - DNA, 80 bp, synthetic construct; identical to SEQ ID NO: 20223
  source 1..80: mol_type = other DNA

SEQ ID NO: 104868 - DNA, 80 bp, synthetic construct
  source 1..80: mol_type = other DNA
aatcaatagcaaccatattcaaatcaattatagacacagtccaactctgggctctgatagacaacaaagagaacgaggca

SEQ ID NO: 104869 - DNA, 80 bp, synthetic construct
  source 1..80: mol_type = other DNA
catgtacttctgcactgtggggtttgttttcaccatgcatgcaccatttttatcagtaaaaaacccaggcctggaaacag

SEQ ID NO: 104870 - DNA, 80 bp, synthetic construct
  source 1..80: mol_type = other DNA
atagggcagagggaagatgggcctagattagccagggtagaagaagcagggcatagggtggataccaaatagatctgggc

SEQ ID NO: 104871 - DNA, 80 bp, synthetic construct; identical to SEQ ID NO: 20224
  source 1..80: mol_type = other DNA

SEQ ID NO: 104872 - DNA, 80 bp, synthetic construct
  source 1..80: mol_type = other DNA
aggaattctccatgaaaagagcttccccagatagctgtcaccttttcagcctaagcctcagaacaaagatgcagagcagc

SEQ ID NO: 104873 - DNA, 80 bp, synthetic construct
  source 1..80: mol_type = other DNA
gtttgttacacagcattattattataatagctgactaatacaccatcctagtccaggcagtcatcttctctttcccaaaa

SEQ ID NO: 104874 - DNA, 80 bp, synthetic construct
  source 1..80: mol_type = other DNA
tccaaacttatctatggtctagaaggccctgcacagtccaaatcctaactcatgaaattcattttaatgtttcaccacac

SEQ ID NO: 104875 - DNA, 80 bp, synthetic construct; identical to SEQ ID NO: 20225
  source 1..80: mol_type = other DNA

SEQ ID NO: 104876 - DNA, 80 bp, synthetic construct
  source 1..80: mol_type = other DNA
tggcactagatagatattggttggatggataaattcttgggaatcaatcggaaggcttgggttagagttccagctctgtt

SEQ ID NO: 104877 - DNA, 80 bp, synthetic construct
  source 1..80: mol_type = other DNA
tcatacaagcaaggggcaaagtaagtcttcagcccctacctcccaatctggataaactgaacgtgagctgtctgctgggc

SEQ ID NO: 104878 - DNA, 80 bp, synthetic construct
  source 1..80: mol_type = other DNA
tcaaatgtctccatcttggtttgctaattcctttaactttgcaaatgaccctgtcttggcctgctaatccctttaaggtt

SEQ ID NO: 104879 - DNA, 80 bp, synthetic construct; identical to SEQ ID NO: 20226
  source 1..80: mol_type = other DNA

SEQ ID NO: 104880 - DNA, 80 bp, synthetic construct
  source 1..80: mol_type = other DNA
agtgtggggccctgggcattctgcagtgtaccccaggatcctcactccttcctgcttactaataccaataacagataata

SEQ ID NO: 104881 - DNA, 80 bp, synthetic construct
  source 1..80: mol_type = other DNA
caaagagattaattaacctgtaccaagtcccacagattgagcgagagtctgagtggcacaaaataagccacgtggctggg

SEQ ID NO: 104882 - DNA, 80 bp, synthetic construct
  source 1..80: mol_type = other DNA
gcaaggacacctgatggctgattgggcagccatcagtctgtcatagaactgactaagtgaccaaagctctgattggcctt

SEQ ID NO: 104883 - DNA, 80 bp, synthetic construct; identical to SEQ ID NO: 20227
  source 1..80: mol_type = other DNA

SEQ ID NO: 104884 - DNA, 80 bp, synthetic construct
  source 1..80: mol_type = other DNA
gtagctgggattacaggcacgcgcctccatgcccggctaatttttgtatttttagtagagatggggtttcaccatgttgg

SEQ ID NO: 104885 - DNA, 80 bp, synthetic construct
  source 1..80: mol_type = other DNA
cattagcatggatgctctatgagggcccagttttttttttgtaagtttatgcacctagagcccagcacacagtaggtgct

SEQ ID NO: 104886 - DNA, 80 bp, synthetic construct
  source 1..80: mol_type = other DNA
ggtcgcctgcccccagtaatgagaccaccccattgcagtccacagtgctgttctttttgccatggagggcgtggccagga

SEQ ID NO: 104887 - DNA, 80 bp, synthetic construct
  source 1..80: mol_type = other DNA
tgctcccgcggctggaacgtggcttcatagaagtcctgctgaggccacgggtgaggctgagatgattctaagggcatgag

SEQ ID NO: 104888 - DNA, 80 bp, synthetic construct; identical to SEQ ID NO: 20228
  source 1..80: mol_type = other DNA

SEQ ID NO: 104889 - DNA, 80 bp, synthetic construct
  source 1..80: mol_type = other DNA
gtcccccagccccggctccagtgccgggatactggcctcaggttggggatatcacaacacccaaaactaccctgtccctc

SEQ ID NO: 104890 - DNA, 80 bp, synthetic construct
  source 1..80: mol_type = other DNA
tgggaccatcttctgagtcagacttggggagcctgtcctccccacactcctcagttcctgaagacatccgttttctcctc

SEQ ID NO: 104891 - DNA, 80 bp, synthetic construct
  source 1..80: mol_type = other DNA
caggcaactctcagtgacttggttttccctatcagtaagtggacttgcacacctaccccaaaatgaggacatcatggaga

SEQ ID NO: 104892 - DNA, 80 bp, synthetic construct; identical to SEQ ID NO: 20229
  source 1..80: mol_type = other DNA

SEQ ID NO: 104893 - DNA, 80 bp, synthetic construct
  source 1..80: mol_type = other DNA
accagaataaactatgtgcatgtatacatgcatctcttatccagcatgcactatgctcacagggaccatctttacccagg

SEQ ID NO: 104894 - DNA, 80 bp, synthetic construct
  source 1..80: mol_type = other DNA
gcacgtcttaacccagcaggttccaaatttttactcagcgataccacattcacagaaaatatctttacccagcaggcact

SEQ ID NO: 104895 - DNA, 80 bp, synthetic construct
  source 1..80: mol_type = other DNA
cactgctcacccacctcgtgttctttcttgagcatttccatggcctcctggaagcgcttttccttctcctcggtctcagc

SEQ ID NO: 104896 - DNA, 80 bp, synthetic construct; identical to SEQ ID NO: 20230
  source 1..80: mol_type = other DNA

SEQ ID NO: 104897 - DNA, 80 bp, synthetic construct
  source 1..80: mol_type = other DNA
tcctacagggagaaagagtgtcccactcacagagcagagagcatcctatacaaagggactggtacttcatcaccagcaaa

SEQ ID NO: 104898 - DNA, 80 bp, synthetic construct
  source 1..80: mol_type = other DNA
gcacacacacacctgctgatagaggcgctcccagcagtcctgcgtcatcaggcggaagagtgcaagaaaggcccaggcaa

SEQ ID NO: 104899 - DNA, 80 bp, synthetic construct; identical to SEQ ID NO: 20231
  source 1..80: mol_type = other DNA

SEQ ID NO: 104900 - DNA, 80 bp, synthetic construct
  source 1..80: mol_type = other DNA
ctggctcatgtctcttcctctgcccatctaccccatgaggagttgagtacagcatgggcatgggggagagcagggttggg

SEQ ID NO: 104901 - DNA, 80 bp, synthetic construct
  source 1..80: mol_type = other DNA
tcacagttcacagagctggaggtggtagcctctctccaaagaggaaatgctggtctggagtcatgtgtgcatgtatgtgt

SEQ ID NO: 104902 - DNA, 80 bp, synthetic construct
  source 1..80: mol_type = other DNA
tttggtgacaggaaggaggcaacaaacttggtacttctcctttgaggtggccctctgtgacccccttctccaacactcca

SEQ ID NO: 104903 - DNA, 80 bp, synthetic construct
  source 1..80: mol_type = other DNA
agttctggggagcttctggaagggaatggagctgggggtgggctggttggggggctgtagaaggcatcccaggctatccc

SEQ ID NO: 104904 - DNA, 80 bp, synthetic construct; identical to SEQ ID NO: 20232
  source 1..80: mol_type = other DNA

SEQ ID NO: 104905 - DNA, 80 bp, synthetic construct
  source 1..80: mol_type = other DNA
acctcactagcggtcttccttcttctctgccccttccctgcccctgcccctgccctctgcctggccaggcttcaggcaac

SEQ ID NO: 104906 - DNA, 80 bp, synthetic construct
  source 1..80: mol_type = other DNA
ccaggaggcaagggtctgggcagttacggcttggctgccgagtcactgtggggccttggccggctactgcccagctctgt

SEQ ID NO: 104907 - DNA, 80 bp, synthetic construct; identical to SEQ ID NO: 20233
  source 1..80: mol_type = other DNA

SEQ ID NO: 104908 - DNA, 80 bp, synthetic construct
  source 1..80: mol_type = other DNA
tgaggccactgctgaactactcattgagtgtctatgttttgttttccaaagtggactgctggtgtatgtaagaggcccta

SEQ ID NO: 104909 - DNA, 80 bp, synthetic construct
  source 1..80: mol_type = other DNA
caacagaggggctcacacaacttggcacaatcattgggcttgttccaaccctcttgcagggttctggggtacacgtatat

SEQ ID NO: 104910 - DNA, 80 bp, synthetic construct
  source 1..80: mol_type = other DNA
cactctagggtcagtcccatctccaaatgccgcagccaactggccctctatctaactccatactttccactcctcaagca

SEQ ID NO: 104911 - DNA, 80 bp, synthetic construct; identical to SEQ ID NO: 20234
  source 1..80: mol_type = other DNA

SEQ ID NO: 104912 - DNA, 80 bp, synthetic construct
  source 1..80: mol_type = other DNA
tgtgaggaccatcacatcagccagcttcttcacagactggatcagggcccccacgatggtcttcagccctggggaaggca

SEQ ID NO: 104913 - DNA, 80 bp, synthetic construct
  source 1..80: mol_type = other DNA
cacagctgagattctgtcctgatttccctgggcaggagtctaggctggctttgtagtttcagagggagcctgctcctctt

SEQ ID NO: 104914 - DNA, 80 bp, synthetic construct
  source 1..80: mol_type = other DNA
aatgtagtccatggaaaaggagatggaggcaattgaggggcctcagccttgatcttgagatggggagaaatagagccatt

SEQ ID NO: 104915 - DNA, 80 bp, synthetic construct
  source 1..80: mol_type = other DNA
gtcaggtgtgtgctgggggctgtgggtgacggtctggcggggtcatggcgggtgatgtctaaggggcctgcgctggctca

SEQ ID NO: 104916 - DNA, 80 bp, synthetic construct; identical to SEQ ID NO: 20235
  source 1..80: mol_type = other DNA

SEQ ID NO: 104917 - DNA, 80 bp, synthetic construct
  source 1..80: mol_type = other DNA
tgttaggagcgcctgtggcttctgtgcctgctgctgctgggcctgtgacccacaggcagggaggccatgatgagcaaaca

SEQ ID NO: 104918 - DNA, 80 bp, synthetic construct
  source 1..80: mol_type = other DNA
ggtggtgagattcacaagctcttcatggtccagagctcctcatctgtaacagagcttcctgtaccctttggtgggtttac

SEQ ID NO: 104919 - DNA, 80 bp, synthetic construct; identical to SEQ ID NO: 20236
  source 1..80: mol_type = other DNA

SEQ ID NO: 104920 - DNA, 80 bp, synthetic construct
  source 1..80: mol_type = other DNA
caattctgatttcactctcattttatggaaaagcgactgagtctagagaggactagggctatttcagactcagctcagag

SEQ ID NO: 104921 - DNA, 80 bp, synthetic construct
  source 1..80: mol_type = other DNA
tgagattggtgggcttcctccttttccccaggaccgagaaatatttccctttgtaaatctttcttataaaacacaccagg

SEQ ID NO: 104922 - DNA, 80 bp, synthetic construct
  source 1..80: mol_type = other DNA
tgagcgggagcagactgcctccttgctactggcccttggcaggggtctgggccacttgtgggagctctgggggagatgcg

SEQ ID NO: 104923 - DNA, 80 bp, synthetic construct; identical to SEQ ID NO: 20237
  source 1..80: mol_type = other DNA

SEQ ID NO: 104924 - DNA, 80 bp, synthetic construct
  source 1..80: mol_type = other DNA
attctcctgcctcagtctcccaagtagctgggattacatgcgtgcaccaccacgcccaactaatttttatatttttagta

SEQ ID NO: 104925 - DNA, 80 bp, synthetic construct
  source 1..80: mol_type = other DNA
tgtctttttaaaagaggtgccttacccagttctaagtgtggctgctttcggaaaagacttctggaaggaacctctgggca

SEQ ID NO: 104926 - DNA, 80 bp, synthetic construct
  source 1..80: mol_type = other DNA
caaccaggctcagaaatcacaagtcttttcagagttttcctagatggatggatggaatggtttctagagatgttatctgg

SEQ ID NO: 104927 - DNA, 80 bp, synthetic construct
  source 1..80: mol_type = other DNA
cccgatgatgcctgtccacagattatgctttgtttcacaaaatggggctggggctctggccctacttctatcaccagatg

SEQ ID NO: 104928 - DNA, 80 bp, synthetic construct; identical to SEQ ID NO: 20238
  source 1..80: mol_type = other DNA

SEQ ID NO: 104929 - DNA, 80 bp, synthetic construct
  source 1..80: mol_type = other DNA
ggcccaggcatatccctctagccttggtgtttaacctgattttcacctgaaatgactgatatagttttcagggcccggag

SEQ ID NO: 104930 - DNA, 80 bp, synthetic construct
  source 1..80: mol_type = other DNA
tgtagctgagatctgagaggcaaacctgggcatcttacctgggataactgaaatagtttttagagctctcaggactctga

SEQ ID NO: 104931 - DNA, 80 bp, synthetic construct; identical to SEQ ID NO: 20239
  source 1..80: mol_type = other DNA

SEQ ID NO: 104932 - DNA, 80 bp, synthetic construct
  source 1..80: mol_type = other DNA
gaagcctgttttccaggaggctcaggtcaggtgatacaggaagcaagtgcatttctggtcctagttttggttcacatctt

SEQ ID NO: 104933 - DNA, 80 bp, synthetic construct
  source 1..80: mol_type = other DNA
aaaaacagagttcccaagacagaggcactggaagatgggaagagaggttgcctgaatatctgttcttccaactactcaca

SEQ ID NO: 104934 - DNA, 80 bp, synthetic construct
  source 1..80: mol_type = other DNA
tcctggggtctgtcctgcttgggtccgagtgaggatcagcagggcaagtggctgtgggccccctcctggaacttgggcag

SEQ ID NO: 104935 - DNA, 80 bp, synthetic construct; identical to SEQ ID NO: 20240
  source 1..80: mol_type = other DNA

SEQ ID NO: 104936 - DNA, 80 bp, synthetic construct
  source 1..80: mol_type = other DNA
ctgctcccagcttcccaattccccttcaggctttgaatatctacaggaaagaacttggccagctgagtcaaggggcttaa

SEQ ID NO: 104937 - DNA, 80 bp, synthetic construct
  source 1..80: mol_type = other DNA
ctgccagagcttgctttcctctgatgacaccagaccctttctgtggtgtggcttccatttcgtctcctgtattcacttca

SEQ ID NO: 104938 - DNA, 80 bp, synthetic construct
  source 1..80: mol_type = other DNA
aacttctgagagctattccattctccacgacggctcagactctcagggctctgtccaacattcttctctcggtctctctc

SEQ ID NO: 104939 - DNA, 80 bp, synthetic construct; identical to SEQ ID NO: 20241
  source 1..80: mol_type = other DNA

SEQ ID NO: 104940 - DNA, 80 bp, synthetic construct
  source 1..80: mol_type = other DNA
tgcttggcctccattcattgtctgccttctaggcagctggtgtcccaaggtgacaaggacagcttagtgacagaataagg

SEQ ID NO: 104941 - DNA, 80 bp, synthetic construct
  source 1..80: mol_type = other DNA
aagaggacttacagggtaagggtgtggaatgtctggggccatgttggtgacttggtgtgctactgcctcttttattctac

SEQ ID NO: 104942 - DNA, 80 bp, synthetic construct
  source 1..80: mol_type = other DNA
gtctgctccttcagtgatggctaagctgctggccagaggcagacagctggacagcagacaggggcagaaagagcaaaggg

SEQ ID NO: 104943 - DNA, 80 bp, synthetic construct
  source 1..80: mol_type = other DNA
ataacaaccccagaaggtgggaggctatgctaactagcaggtaatgcccttctgtgagtggggccacaggaagagctctg

SEQ ID NO: 104944 - DNA, 80 bp, synthetic construct; identical to SEQ ID NO: 20242
  source 1..80: mol_type = other DNA

SEQ ID NO: 104945 - DNA, 80 bp, synthetic construct
  source 1..80: mol_type = other DNA
aaatctcctttgatcatcctagagtcccttgttactgaaccattgcatctctaagagaatgcatttcaaagccagaatcc

SEQ ID NO: 104946 - DNA, 80 bp, synthetic construct
  source 1..80: mol_type = other DNA
cggccctggcacacagcaaaggcaagcaggtttcggtgaggaaggcacacctgctttgtgactcccagtgaaagaagcgg

SEQ ID NO: 104947 - DNA, 80 bp, synthetic construct
  source 1..80: mol_type = other DNA
acttttcctgggatctggggctgcctctgtggtgatactgtcttgcccaggctccaggttggggagctaggaaaggctca

SEQ ID NO: 104948 - DNA, 80 bp, synthetic construct; identical to SEQ ID NO: 20243
  source 1..80: mol_type = other DNA

SEQ ID NO: 104949 - DNA, 80 bp, synthetic construct
  source 1..80: mol_type = other DNA
gggctttgctcctgcaatccccttgctcatctacatcatctagcattctctctctactggatcattttcaccagcctgca

SEQ ID NO: 104950 - DNA, 80 bp, synthetic construct
  source 1..80: mol_type = other DNA
aagtgcatgtccttttcctccactggaacctctcttgtcaagggcaccagtgaccttccccctctgtcaaatccaatagt

SEQ ID NO: 104951 - DNA, 80 bp, synthetic construct; identical to SEQ ID NO: 20244
  source 1..80: mol_type = other DNA

SEQ ID NO: 104952 - DNA, 80 bp, synthetic construct
  source 1..80: mol_type = other DNA
ttcaaatgtcatacatcccaaactggacttttgattttcttcctacttcagccagtgtcgctctctccaattttccattt

SEQ ID NO: 104953 - DNA, 80 bp, synthetic construct
  source 1..80: mol_type = other DNA
ttccaagatatagcctcctaactactccgtctgtctctaccttctccagtctgtggtccacaccatagccaggggagtct

SEQ ID NO: 104954 - DNA, 80 bp, synthetic construct
  source 1..80: mol_type = other DNA
catactgggtttggggcaagtaagtggtattgtctctcagagccagttttcccacttgtaaaatggagggctagagttgg

SEQ ID NO: 104955 - DNA, 80 bp, synthetic construct; identical to SEQ ID NO: 20245
  source 1..80: mol_type = other DNA

SEQ ID NO: 104956 - DNA, 80 bp, synthetic construct
  source 1..80: mol_type = other DNA
ttgctctgttgcccaggctggagtgcagtgatgtgatcacagctcactgcagccttgacttcatgggttcaagtgatcct

SEQ ID NO: 104957 - DNA, 80 bp, synthetic construct
  source 1..80: mol_type = other DNA
gagccaccgcactcagccttcaaaatgcctttgatggttgagcctctgatcacgacttctgcagatgtcccatcagaacc

SEQ ID NO: 104958 - DNA, 80 bp, synthetic construct
  source 1..80: mol_type = other DNA
tcagttttctcacccataaaatgggctaagccatccccaggtagcctacttctctggctggtgtgaggatccactgtatt

SEQ ID NO: 104959 - DNA, 80 bp, synthetic construct; identical to SEQ ID NO: 20246
  source 1..80: mol_type = other DNA

SEQ ID NO: 104960 - DNA, 80 bp, synthetic construct
  source 1..80: mol_type = other DNA
ccttcctccagcctgtgtgcagagctgcatgtggactgcagggaggaagccagaaagagaggggtggtctggggcctggg

SEQ ID NO: 104961 - DNA, 80 bp, synthetic construct
  source 1..80: mol_type = other DNA
gagactcaaaggtgtaaatggcggtgaaggtgtacctgggcaggagaggccggtggggtttcttagggaggcctgagcag

SEQ ID NO: 104962 - DNA, 80 bp, synthetic construct
  source 1..80: mol_type = other DNA
ttattccatattatcgtgtaactgccatgtgtccatctgaactctctgtattctctctcggttgtcttggtggaagaaga

SEQ ID NO: 104963 - DNA, 80 bp, synthetic construct
  source 1..80: mol_type = other DNA
cagggtgggtgggtccagctgtccaccttgggcttgaaggggtgttgatattataatgcatggggctgatgggagtcggg

SEQ ID NO: 104964 - DNA, 80 bp, synthetic construct; identical to SEQ ID NO: 20247
  source 1..80: mol_type = other DNA

SEQ ID NO: 104965 - DNA, 80 bp, synthetic construct
  source 1..80: mol_type = other DNA
tttgtttgggaagaaaagaaccagaagcagtttctggaactgtgcaaatggttataggaggcaggacttgggaaaaaaaa

SEQ ID NO: 104966 - DNA, 80 bp, synthetic construct
  source 1..80: mol_type = other DNA
gggtggccatgagggttaaaggagatgatgcttattgttcttatgacagtgcctggcgtgtacaaaatgctcaataaatt

SEQ ID NO: 104967 - DNA, 80 bp, synthetic construct; identical to SEQ ID NO: 20248
  source 1..80: mol_type = other DNA

SEQ ID NO: 104968 - DNA, 80 bp, synthetic construct
  source 1..80: mol_type = other DNA
aggatggtgcacatgatgagcatgttgaagagcgtgcgtggggtcaaggaaagctgagcagcatgggccggccacgccac

SEQ ID NO: 104969 - DNA, 80 bp, synthetic construct
  source 1..80: mol_type = other DNA
ggccccctggcctgctccatgacacctaataggcaccagagacttgaaaccacactgctggtagggtctcgtgtggaggg

SEQ ID NO: 104970 - DNA, 80 bp, synthetic construct
  source 1..80: mol_type = other DNA
ctaggggagcagcccaggccaggcgttgtctagaagttctctgcagaatgccctgctgccaaacaactgcacacctggcc

SEQ ID NO: 104971 - DNA, 80 bp, synthetic construct; identical to SEQ ID NO: 20249
  source 1..80: mol_type = other DNA

SEQ ID NO: 104972 - DNA, 80 bp, synthetic construct
  source 1..80: mol_type = other DNA
gctccaatcgccctcctccacctctgcaaggcctgcagaggaacaagggggcagactctgggcctcctgtaggctggggc

SEQ ID NO: 104973 - DNA, 80 bp, synthetic construct
  source 1..80: mol_type = other DNA
attcccacaggccgcccaggagctgcggtaattgagctccaggggctgcctcttgcctccctagcatagctccacctcac

SEQ ID NO: 104974 - DNA, 80 bp, synthetic construct
  source 1..80: mol_type = other DNA
ctcaaaccagcctccagtttataattatttagtttctcatctgggacgagaggaaattaggctttgggactctcccttag

SEQ ID NO: 104975 - DNA, 80 bp, synthetic construct
  source 1..80: mol_type = other DNA
aggcttatatccctctccagctttcaaggcaggatcagataatcatctcagtatcagtaccccttctcccttacacacac

SEQ ID NO: 104976 - DNA, 80 bp, synthetic construct; identical to SEQ ID NO: 20250
  source 1..80: mol_type = other DNA

SEQ ID NO: 104977 - DNA, 80 bp, synthetic construct
  source 1..80: mol_type = other DNA
ccccaccacccccaaggtggccatggaggaatccccggaaactgtgaatatgctaatttgtatgacaaaatgagaccgtg

SEQ ID NO: 104978 - DNA, 80 bp, synthetic construct
  source 1..80: mol_type = other DNA
caggtgcacactaccatagccagctaatttttaatttttttttgtagacacaacgtcttaccatgttgcttagctggtct

SEQ ID NO: 104979 - DNA, 80 bp, synthetic construct; identical to SEQ ID NO: 20251
  source 1..80: mol_type = other DNA

SEQ ID NO: 104980 - DNA, 80 bp, synthetic construct
  source 1..80: mol_type = other DNA
gctgacaccctgagtttagtccagcaagaaccattttggacctctgacctccaaagctgtaaggtgataaatctgctttg

SEQ ID NO: 104981 - DNA, 80 bp, synthetic construct
  source 1..80: mol_type = other DNA
aggccacccggtccactctcctgcctccagactggagggtctgcatgagtcatgctgcttctggctctcacatgccaagc

SEQ ID NO: 104982 - DNA, 80 bp, synthetic construct
  source 1..80: mol_type = other DNA
ctgagtgggagccaggggggcaatggagccatgtccccaaaacgctctgacatgggatattatgaaaaaaccaaacatgc

SEQ ID NO: 104983 - DNA, 80 bp, synthetic construct
  source 1..80: mol_type = other DNA
ttccagctctagggggaccactcacagctctccttagagtgggggaacaggccccattgcagggagcagtggtgtgaaca

SEQ ID NO: 104984 - DNA, 80 bp, synthetic construct; identical to SEQ ID NO: 20252
  source 1..80: mol_type = other DNA

SEQ ID NO: 104985 - DNA, 80 bp, synthetic construct
  source 1..80: mol_type = other DNA
atagagacgagtcaactgaactcctggccagggcacacctgtttgcactgccttgtaatttcaggctgatgattgagctg

SEQ ID NO: 104986 - DNA, 80 bp, synthetic construct
  source 1..80: mol_type = other DNA
gctgcctaagtcttcagatcccagggagtttaaaaaaaaaaaccacccaaagaaaaggtaattaactctggaggggtatt

SEQ ID NO: 104987 - DNA, 80 bp, synthetic construct; identical to SEQ ID NO: 20253
  source 1..80: mol_type = other DNA

SEQ ID NO: 104988 - DNA, 80 bp, synthetic construct
  source 1..80: mol_type = other DNA
acttgctacggtctgtgagctcctggattgtcacgactgagcaggttttctcaccaggctgcattcctgcccacttttaa

SEQ ID NO: 104989 - DNA, 80 bp, synthetic construct
  source 1..80: mol_type = other DNA
atgagacctgatgttctttagaaatgcatagtgactgataatgggcacaggatttcttttggggtggtgcaaatgttctg

SEQ ID NO: 104990 - DNA, 80 bp, synthetic construct
  source 1..80: mol_type = other DNA
aagaccagcatggccaagatggtgaaaccccacctttactaaaaatacaaaaattagcccggcgtggtggcggacgcctg

SEQ ID NO: 104991 - DNA, 80 bp, synthetic construct; identical to SEQ ID NO: 20254
  source 1..80: mol_type = other DNA

SEQ ID NO: 104992 - DNA, 80 bp, synthetic construct
  source 1..80: mol_type = other DNA
caacatcctggtgaagctgatgctactggtccacacaccacactcaatgtcaaggctcaacagtgttgctgaggggctgc

SEQ ID NO: 104993 - DNA, 80 bp, synthetic construct
  source 1..80: mol_type = other DNA
cactgggaacccagtacaggtcctcactgatgcttgacaattccctggggcagctgtcctgggggatagaggctggctcc

SEQ ID NO: 104994 - DNA, 80 bp, synthetic construct
  source 1..80: mol_type = other DNA
gcaccttgcaggagctctggagcttctgctacatccctgagggcttctgtggctgccaaacagtgctgggttggttagat

SEQ ID NO: 104995 - DNA, 80 bp, synthetic construct; identical to SEQ ID NO: 20255
  source 1..80: mol_type = other DNA

SEQ ID NO: 104996 - DNA, 80 bp, synthetic construct
  source 1..80: mol_type = other DNA
cactttgctcacgccacagccatggtttgcatgtggggttgtctcatgaaccccaccagaaaggcaggggtaggctggag

SEQ ID NO: 104997 - DNA, 80 bp, synthetic construct
  source 1..80: mol_type = other DNA
gggcaggaaaagctcctgacctgccagcctcagtcctggttatttagtccctcactaggtatctgtaatcctgatgcctc

SEQ ID NO: 104998 - DNA, 80 bp, synthetic construct
  source 1..80: mol_type = other DNA
agcagagccacctgcgtgtgtgcactcaccctggttgccactggccaaagggaggcctgcccaggccctcgcagtgaaat

SEQ ID NO: 104999 - DNA, 80 bp, synthetic construct; identical to SEQ ID NO: 20256
  source 1..80: mol_type = other DNA

SEQ ID NO: 105000 - DNA, 80 bp, synthetic construct
  source 1..80: mol_type = other DNA
cagagttctttgagatactctgaaactgcaaacattttgtcaacgcctaatcaaaaagcaagtgctgcctccctcaaaag

SEQ ID NO: 105001 - DNA, 80 bp, synthetic construct
  source 1..80: mol_type = other DNA
gacagacgtcatttcttctgggatcctcagtagcttagcttctagaatgttctgaagaatcagaagagggtttctcaaac

SEQ ID NO: 105002 - DNA, 80 bp, synthetic construct
  source 1..80: mol_type = other DNA
tgtcttaggaccagcagggaatcagcgctactctcactcctaaactagaatggaggtggggtgggggcagcacgtgcaca

SEQ ID NO: 105003 - DNA, 80 bp, synthetic construct
  source 1..80: mol_type = other DNA
gtacgatgaaagtctggggacagacagtagcattaggcccttgtgtagaaaggcttttgggggcagcttttggctcagag

SEQ ID NO: 105004 - DNA, 80 bp, synthetic construct; identical to SEQ ID NO: 20257
  source 1..80: mol_type = other DNA

SEQ ID NO: 105005 - DNA, 80 bp, synthetic construct
  source 1..80: mol_type = other DNA
agaagcagtcccctgagagagcttttcttgggaccctgtctcctggagtccaggacaaatgtcagccccatcccacagga

SEQ ID NO: 105006 - DNA, 80 bp, synthetic construct
  source 1..80: mol_type = other DNA
aggacagcagtgcctccccacctgccccggtgtgtggtggtcacagctctgtggcctcacggaggtctaggggaatgtca

SEQ ID NO: 105007 - DNA, 80 bp, synthetic construct
  source 1..80: mol_type = other DNA
ctccattgccttgtggggctgcaggcagcgtggccagggatcaacaagtggaaacagaaagtgagaggccggaatcatcc

SEQ ID NO: 105008 - DNA, 80 bp, synthetic construct; identical to SEQ ID NO: 20258
  source 1..80: mol_type = other DNA

SEQ ID NO: 105009 - DNA, 80 bp, synthetic construct
  source 1..80: mol_type = other DNA
ccaagttcaaggcctcctcccccacctgtttatgtggactgggtgggcttttacttcacatgcacaaccactcacgtatc

SEQ ID NO: 105010 - DNA, 80 bp, synthetic construct
  source 1..80: mol_type = other DNA
gtgcctggccactgtcttcctcatactcagccttctgggaaaaatacctcccccaaattcaaatccaccttcctctggaa

SEQ ID NO: 105011 - DNA, 80 bp, synthetic construct
  source 1..80: mol_type = other DNA
ggaagcccaagtctccctgccctagcagacaaaagccacttcccttccctatgatcagaagggacaatggcagaacatca

SEQ ID NO: 105012 - DNA, 80 bp, synthetic construct
  source 1..80: mol_type = other DNA
gggtgtggggactacatgctgtccccattaaggagaaaggaccacaggctatgctctgtggcccaaactcaggcagggcc

SEQ ID NO: 105013 - DNA, 80 bp, synthetic construct; identical to SEQ ID NO: 20259
  source 1..80: mol_type = other DNA

SEQ ID NO: 105014 - DNA, 80 bp, synthetic construct
  source 1..80: mol_type = other DNA
tccaggtcctccaggggctctccgatgagctcttggggtggattgccatagagatctggcagctttttggaggcctgcag

SEQ ID NO: 105015 - DNA, 80 bp, synthetic construct
  source 1..80: mol_type = other DNA
aagtttgccatcttctcatcctgcttctgggcacaggctctcctcacgttgcctgtggggaagctggaagacacagacaa

SEQ ID NO: 105016 - DNA, 80 bp, synthetic construct
  source 1..80: mol_type = other DNA
ctccacaggcacacctgggcaacactggcctgggtaaacccaaagcccccccaggctacgaggcacacatgtagacaggc

SEQ ID NO: 105017 - DNA, 80 bp, synthetic construct; identical to SEQ ID NO: 20260
  source 1..80: mol_type = other DNA

SEQ ID NO: 105018 - DNA, 80 bp, synthetic construct
  source 1..80: mol_type = other DNA
aacccgaagataactctgccttccatctcccccatcccctttaaaaatacatacatgcttacagattttgtaataaccaa

SEQ ID NO: 105019 - DNA, 80 bp, synthetic construct
  source 1..80: mol_type = other DNA
actcatcagcgaggacatccagccggcacaggcatgtgatgccaaaccgggagaatgtggcccctggtggcctcaaacaa

SEQ ID NO: 105020 - DNA, 80 bp, synthetic construct
  source 1..80: mol_type = other DNA
ggcacccgttcaagagggcacggtggacacctgttggacatctctgccagaacagaatcctttcccctcacgagggtcag

SEQ ID NO: 105021 - DNA, 80 bp, synthetic construct; identical to SEQ ID NO: 20261
  source 1..80: mol_type = other DNA

SEQ ID NO: 105022 - DNA, 80 bp, synthetic construct
  source 1..80: mol_type = other DNA
tttgagtgaacagacatctgtaacactcatcaatgcatgtgagtgaggacttttttttcttagctcatggatatttgggt

SEQ ID NO: 105023 - DNA, 80 bp, synthetic construct
  source 1..80: mol_type = other DNA
ctccactgtgagcaatcagttccataaattgggaagccacctcttttgcttggacttaatttctaaaaacagtgttctct

SEQ ID NO: 105024 - DNA, 80 bp, synthetic construct; identical to SEQ ID NO: 20262
  source 1..80: mol_type = other DNA

SEQ ID NO: 105025 - DNA, 80 bp, synthetic construct
  source 1..80: mol_type = other DNA
gggaatcactctcctcactgctaatggcatagaccagttttgcctgtctgtgtattaatagttcaggggcccttcttaac

SEQ ID NO: 105026 - DNA, 80 bp, synthetic construct
  source 1..80: mol_type = other DNA
tgaccaaaagaaactgcagctatttccctgtcatgttacagttgctgctggcctctcaaataacattaatactcatcacg

SEQ ID NO: 105027 - DNA, 80 bp, synthetic construct
  source 1..80: mol_type = other DNA
ttggtttcctttttaatcctatgtgttttattttgtctcaaaatatgtgcttctgagatgggcttcgctcaactggtaga

SEQ ID NO: 105028 - DNA, 80 bp, synthetic construct; identical to SEQ ID NO: 20263
  source 1..80: mol_type = other DNA

SEQ ID NO: 105029 - DNA, 80 bp, synthetic construct
  source 1..80: mol_type = other DNA
ggcctccagcagagcatccactcgctcggggccctggcctgggaggggtatagtctgcccaagggagctgctgaaaccag

SEQ ID NO: 105030 - DNA, 80 bp, synthetic construct
  source 1..80: mol_type = other DNA
ccctgcccttcctttagcagctcagggcccacgccctgctgtggccaagcctggctgagtcctgcctgcagggcttccgg

SEQ ID NO: 105031 - DNA, 80 bp, synthetic construct
  source 1..80: mol_type = other DNA
gttggtctcacatagccccagagtttggggaggctggacctggcttgattgtaagaccacagtcgctcatcccctagatg

SEQ ID NO: 105032 - DNA, 80 bp, synthetic construct
  source 1..80: mol_type = other DNA
tagagccccacccccaactccatcctgccccaggttcatcagcttctggaactggatgcatccctccctgcatccggaag

SEQ ID NO: 105033 - DNA, 80 bp, synthetic construct; identical to SEQ ID NO: 20264
  source 1..80: mol_type = other DNA

SEQ ID NO: 105034 - DNA, 80 bp, synthetic construct
  source 1..80: mol_type = other DNA
gtgtattcacatcaaggtagagatgctgcacaaggagaatattaactgttcacaccagaaactagacccccctgcactgt

SEQ ID NO: 105035 - DNA, 80 bp, synthetic construct
  source 1..80: mol_type = other DNA
ctacttgtcccggtttacatgggactttcctcattttggcagtaaaatttctgcaccttgggataccccccagtcctgga

SEQ ID NO: 105036 - DNA, 80 bp, synthetic construct; identical to SEQ ID NO: 20265
  source 1..80: mol_type = other DNA

SEQ ID NO: 105037 - DNA, 80 bp, synthetic construct
  source 1..80: mol_type = other DNA
gcactcgccttctgcctgcccctcagtgctaaagaagaggctcaggaagagggtgtgggtgccctcaaaacaggagctca

SEQ ID NO: 105038 - DNA, 80 bp, synthetic construct
  source 1..80: mol_type = other DNA
gatgtagcttgacaagctgtaacttcaccccagtcatccacaggcccccaaatgtggagatgacagccaggaacctcgct

SEQ ID NO: 105039 - DNA, 80 bp, synthetic construct
  source 1..80: mol_type = other DNA
tacatggtcctaaaaatgactacacagaatacttttcttcccaaagtgatggatcccaaatcaacaagagataatgaggg

SEQ ID NO: 105040 - DNA, 80 bp, synthetic construct
  source 1..80: mol_type = other DNA
tttcctgttcctagggataaggaagtggttagggctgtgcttggaagccagctcacctgagtgaatctgggccctggcca

SEQ ID NO: 105041 - DNA, 80 bp, synthetic construct; identical to SEQ ID NO: 20266
  source 1..80: mol_type = other DNA

SEQ ID NO: 105042 - DNA, 80 bp, synthetic construct
  source 1..80: mol_type = other DNA
tggatttttgtcctggtctcccaaagcagggactggtgaatgaaggaatgaaagaatgagggagtgtgagattaaccttc

SEQ ID NO: 105043 - DNA, 80 bp, synthetic construct
  source 1..80: mol_type = other DNA
ccttgcaacaatcctaggaagacgggggttattagcctcgctttacagatgggaaatctgactgtaggagagatgaagtg

SEQ ID NO: 105044 - DNA, 80 bp, synthetic construct
  source 1..80: mol_type = other DNA
ctgtgtctgtgacccccacttcaaggctaagagtcagccctgtcagcctcatctgagcctggttctccctctatgcagcc

SEQ ID NO: 105045 - DNA, 80 bp, synthetic construct; identical to SEQ ID NO: 20267
  source 1..80: mol_type = other DNA

SEQ ID NO: 105046 - DNA, 80 bp, synthetic construct
  source 1..80: mol_type = other DNA
tgtgactcatattatatttctgttggatggcactggcatcaagttccagccaccaggccctaagcccttaaaaaaattct

SEQ ID NO: 105047 - DNA, 80 bp, synthetic construct
  source 1..80: mol_type = other DNA
gcacctgtaatcccagctaccaggaggctgaggcaggaaaattgcttgaactcgggaggcagaggttgcagtgagcggag

SEQ ID NO: 105048 - DNA, 80 bp, synthetic construct
  source 1..80: mol_type = other DNA
tgcccatcctggtttctggcagtggctgtgggtggttgtggaggctcaagccacaggttgggatggtgggggatgtaagt

SEQ ID NO: 105049 - DNA, 80 bp, synthetic construct; identical to SEQ ID NO: 20268
  source 1..80: mol_type = other DNA

SEQ ID NO: 105050 - DNA, 80 bp, synthetic construct
  source 1..80: mol_type = other DNA
ggaatgccctcatttacatacatttacatctcatttattccaacacccaggctgaagccgaggctaattcagctgacagg

SEQ ID NO: 105051 - DNA, 80 bp, synthetic construct
  source 1..80: mol_type = other DNA
gacaaactggcctgggggtagccactctcttcactgaaaggtgggtggccctgcttttttcttcatagcccttccccaca

SEQ ID NO: 105052 - DNA, 80 bp, synthetic construct; identical to SEQ ID NO: 20269
  source 1..80: mol_type = other DNA

SEQ ID NO: 105053 - DNA, 80 bp, synthetic construct
  source 1..80: mol_type = other DNA
tcaggccagaaaggtgcccacatgtggcccaggaaacaccgtcatggcacacaggtgcccgagacagcaatcagcgttct

SEQ ID NO: 105054 - DNA, 80 bp, synthetic construct
  source 1..80: mol_type = other DNA
tctagggtctcttagtgtccagagggaaataagccaatcaaccaatacactaaatttatgccacaaaagtgtccatgatg

SEQ ID NO: 105055 - DNA, 80 bp, synthetic construct
  source 1..80: mol_type = other DNA
cccagaaagtcccactattcctttcagtcaactgctctgatttctatcacctaggttggttttgcctgttctggaacttc

SEQ ID NO: 105056 - DNA, 80 bp, synthetic construct; identical to SEQ ID NO: 20270
  source 1..80: mol_type = other DNA

SEQ ID NO: 105057 - DNA, 80 bp, synthetic construct
  source 1..80: mol_type = other DNA
gcaactagctgtcgctttatttaactggcagtctgtgctgcatctgacccagcacagtggtgaggctgtcgctgcaaatg

SEQ ID NO: 105058 - DNA, 80 bp, synthetic construct
  source 1..80: mol_type = other DNA
ctggggttcttcctaggagcatgcccagaggcagcagagctgcgcagccaagggcgggcaccttggctctgaggggcttg

SEQ ID NO: 105059 - DNA, 80 bp, synthetic construct
  source 1..80: mol_type = other DNA
gatggctaatgtagcttgagtaccctgagaactgatttggtgcctgaagccagattacctctctctgctctgccaactct

SEQ ID NO: 105060 - DNA, 80 bp, synthetic construct
  source 1..80: mol_type = other DNA
tctgagctctgcccacttccccgtgtgaccttgagcctatggggcagccagcaccagccttggccacccagggctgttag

SEQ ID NO: 105061 - DNA, 80 bp, synthetic construct; identical to SEQ ID NO: 20271
  source 1..80: mol_type = other DNA

SEQ ID NO: 105062 - DNA, 80 bp, synthetic construct
  source 1..80: mol_type = other DNA
ttaagaattttcactgtccttttctgcccctccagaatagtaaacagagtgaggaatggacaagagaggttgagaaactg

SEQ ID NO: 105063 - DNA, 80 bp, synthetic construct
  source 1..80: mol_type = other DNA
ccatggctgtggctcttcagggaagacaagtgacggcaggcggggtggagaaggtaagataagtgttaaagaattgatgt

SEQ ID NO: 105064 - DNA, 80 bp, synthetic construct; identical to SEQ ID NO: 20272
  source 1..80: mol_type = other DNA

SEQ ID NO: 105065 - DNA, 80 bp, synthetic construct
  source 1..80: mol_type = other DNA
tttgcacttgcagttccctctgtaacattctttccctagacctcctcgggcttggttctttcatgttattcaggtctcag

SEQ ID NO: 105066 - DNA, 80 bp, synthetic construct
  source 1..80: mol_type = other DNA
gtaaacttcataagaacaattgttatagcttgtacaccttctagaaccttccatggcccaaaggcatgaactctgcctca

SEQ ID NO: 105067 - DNA, 80 bp, synthetic construct
  source 1..80: mol_type = other DNA
tccacaggctactcactggccctgctttttcctctctctgccttcttcatgtatttagccgcagggcttttactccagct

SEQ ID NO: 105068 - DNA, 80 bp, synthetic construct
  source 1..80: mol_type = other DNA
tccctcccagagattcacagaaagagttattccctctacccaggccttcctgactgccccctgaacaaacagtaaccact

SEQ ID NO: 105069 - DNA, 80 bp, synthetic construct; identical to SEQ ID NO: 20273
  source 1..80: mol_type = other DNA

SEQ ID NO: 105070 - DNA, 80 bp, synthetic construct
  source 1..80: mol_type = other DNA
ggagtttctcctaccaaggtcaccagcaccctcaccatggctcgatctaatggacacttctttttaaattattcattctt

SEQ ID NO: 105071 - DNA, 80 bp, synthetic construct
  source 1..80: mol_type = other DNA
tctctgcagacttctcctgctttgatggttggagtatttctgggctcctgactcagcccccttccttcttaccctctaca

SEQ ID NO: 105072 - DNA, 80 bp, synthetic construct
  source 1..80: mol_type = other DNA
ctgcactctcgctgggcaatctaactcagtgccacatctccaatgaccaacctctgctgaaagctctaagtttccatttc

SEQ ID NO: 105073 - DNA, 80 bp, synthetic construct; identical to SEQ ID NO: 20274
  source 1..80: mol_type = other DNA

SEQ ID NO: 105074 - DNA, 80 bp, synthetic construct
  source 1..80: mol_type = other DNA
gagctggggaggtggtatagtacacagcagatattgacacttgggctcaaacccaagttctgctacttagaaaatgtgac

SEQ ID NO: 105075 - DNA, 80 bp, synthetic construct
  source 1..80: mol_type = other DNA
ttagctatttttagtaacattactgaggataaattcccaattcctgagcagagctcacaagggcccccgtgactgtgacc

SEQ ID NO: 105076 - DNA, 80 bp, synthetic construct; identical to SEQ ID NO: 20275
  source 1..80: mol_type = other DNA

SEQ ID NO: 105077 - DNA, 80 bp, synthetic construct
  source 1..80: mol_type = other DNA
ctcttctcccatccccagctgtctctggtgcttcccactagtcctccaagcccaatcttcatgctgagtgagtcaatact

SEQ ID NO: 105078 - DNA, 80 bp, synthetic construct
  source 1..80: mol_type = other DNA
ttgccccacagaaagtagatctcaaggtgtcttcacattgcgtggtgcccccaatccactgattctctagatgacattga

SEQ ID NO: 105079 - DNA, 80 bp, synthetic construct
  source 1..80: mol_type = other DNA
ccatgctcctgcaacagcagcctgaccaccctcattccacctcgcactcattaccaccgattcatatgcacctgcccaat

SEQ ID NO: 105080 - DNA, 80 bp, synthetic construct
  source 1..80: mol_type = other DNA
cacgtggtttgccatctggatgatactgcctaggctcactgggagacacacctggggtctcagcaggaggcgagcagatg

SEQ ID NO: 105081 - DNA, 80 bp, synthetic construct; identical to SEQ ID NO: 20276
  source 1..80: mol_type = other DNA

SEQ ID NO: 105082 - DNA, 80 bp, synthetic construct
  source 1..80: mol_type = other DNA
caatctcaccgcaaagagatctccaccccttcgagaagcacagagatcagacagaggagatgcggcccctttagggcgtc

SEQ ID NO: 105083 - DNA, 80 bp, synthetic construct
  source 1..80: mol_type = other DNA
tctggaaccacattcatggcgcgcctagtcgccgctctgaccttggggtctccggcctccggtatccgggtcccaatccc

SEQ ID NO: 105084 - DNA, 80 bp, synthetic construct
  source 1..80: mol_type = other DNA
ggcggatctgcgccccttctccccctccggctctctggggcactgatcggggagggagcggctgggcggacccggggcag

SEQ ID NO: 105085 - DNA, 80 bp, synthetic construct
  source 1..80: mol_type = other DNA
cgcggactcggctcggcgcggggctcggggcactgggcgcaggctcagcggccccgggggagcgatccctgcatcctacg

SEQ ID NO: 105086 - DNA, 80 bp, synthetic construct
  source 1..80: mol_type = other DNA
ggctaggagttcccggaagtgcccgcgcagccggtttccggtgcaggtggggaaaatggcggtgtctacagtgttctcga

SEQ ID NO: 105087 - DNA, 80 bp, synthetic construct
  source 1..80: mol_type = other DNA
ggaaataaaggtcgcttccattctttggtgagcctactgtgtgccggtctggaaatatctgcttaaacgatcagtcatcg

SEQ ID NO: 105088 - DNA, 80 bp, synthetic construct
  source 1..80: mol_type = other DNA
ttatgggggtacagtataatgttttaatacatgtgtacatcgaataatcaaatcagcgtagttagcatgtccatcacctc

SEQ ID NO: 105089 - DNA, 80 bp, synthetic construct; identical to SEQ ID NO: 20277
  source 1..80: mol_type = other DNA

SEQ ID NO: 105090 - DNA, 80 bp, synthetic construct
  source 1..80: mol_type = other DNA
tggagtgcaatggcacgaacttggctcactgcaacctccacctaccgggttcaagcgattcttccgcctcagcctcccag

SEQ ID NO: 105091 - DNA, 80 bp, synthetic construct; identical to SEQ ID NO: 20278
  source 1..80: mol_type = other DNA

SEQ ID NO: 105092 - DNA, 80 bp, synthetic construct
  source 1..80: mol_type = other DNA
cacatatttgtgaattttccaccttttcttttgccattgatttccagattttaataaaatgtctcttgtgcggcatatag

SEQ ID NO: 105093 - DNA, 80 bp, synthetic construct
  source 1..80: mol_type = other DNA
atctcctggtttaggagtagctgggactacaggcgccccccaccacgcctggctaattttttgtatttttagtagagacg

SEQ ID NO: 105094 - DNA, 80 bp, synthetic construct
  source 1..80: mol_type = other DNA
cgtgtgagtcctggagttcgagaccagcctgggcaacatggcaaaaccccttttctactaaaaaaaattagtcaggtgtg

SEQ ID NO: 105095 - DNA, 80 bp, synthetic construct; identical to SEQ ID NO: 20279
  source 1..80: mol_type = other DNA

SEQ ID NO: 105096 - DNA, 80 bp, synthetic construct
  source 1..80: mol_type = other DNA
acagatacggagggccaactgtgcttgctgttgccgttttgtaaactgttctctgtcttacaacctttttgctcctcttt

SEQ ID NO: 105097 - DNA, 80 bp, synthetic construct
  source 1..80: mol_type = other DNA
gataacttaatttccattgcatacaaaaactctgctcttttatgacccccttgtatgttgtggatgtcacaaattacatc

SEQ ID NO: 105098 - DNA, 80 bp, synthetic construct
  source 1..80: mol_type = other DNA
ttttttgagacggagtctcgctctgttgccaggctggagtgcagtggcgcgatcttggctcactgcaacctccatctcct

SEQ ID NO: 105099 - DNA, 80 bp, synthetic construct; identical to SEQ ID NO: 20280
  source 1..80: mol_type = other DNA

SEQ ID NO: 105100 - DNA, 80 bp, synthetic construct
  source 1..80: mol_type = other DNA
agtatagaaagtaggaatccctgccttcagtctgcatcagaatctcttagagggttgttaaaaattcattcgtcagggcc

SEQ ID NO: 105101 - DNA, 80 bp, synthetic construct; identical to SEQ ID NO: 20281
  source 1..80: mol_type = other DNA

SEQ ID NO: 105102 - DNA, 80 bp, synthetic construct
  source 1..80: mol_type = other DNA
cctcacatttctctgtgcatgcacatccttggtgtctcttttgtgactttttaaagacataggatcttgctttgttgctc

SEQ ID NO: 105103 - DNA, 80 bp, synthetic construct
  source 1..80: mol_type = other DNA
gatctgttaggcttgaatctggatgtccacttctttccccaactttgggggtttttagccattatgtctttttttttgag

SEQ ID NO: 105104 - DNA, 80 bp, synthetic construct
  source 1..80: mol_type = other DNA
agagacggtttcgccatgttggccaggctggtcttgaactccttacctcaggtgatccgttcacctcagcctcccaaagt

SEQ ID NO: 105105 - DNA, 80 bp, synthetic construct; identical to SEQ ID NO: 20282
  source 1..80: mol_type = other DNA

SEQ ID NO: 105106 - DNA, 80 bp, synthetic construct
  source 1..80: mol_type = other DNA
ccattcttctgcctcaggcctcccaggtagctgggactacaggcgcccgccactatgcccggctaatgttttgtattttt

SEQ ID NO: 105107 - DNA, 80 bp, synthetic construct
  source 1..80: mol_type = other DNA
ttagagacggggtctcactgtgttgcccaggctggttctcgaactcctgagctcaagcgatcctccagcctcagcctccc

SEQ ID NO: 105108 - DNA, 80 bp, synthetic construct
  source 1..80: mol_type = other DNA
gctcaatgttcaagttctcaatgttccaaagctcattgaacatctttattatggctagtttgaattctttataggtgatt

SEQ ID NO: 105109 - DNA, 80 bp, synthetic construct; identical to SEQ ID NO: 20283
  source 1..80: mol_type = other DNA

SEQ ID NO: 105110 - DNA, 80 bp, synthetic construct
  source 1..80: mol_type = other DNA
tcagtgccccaagctgggcaagacagaaaccagtccctctggtagcttccccaaaggacagaatgttacgactgggtgtg

SEQ ID NO: 105111 - DNA, 80 bp, synthetic construct
  source 1..80: mol_type = other DNA
ctcgggaggctgaagcaggagaattgcttgatcctgggaggcggaggttgtggtgagccgagatcgcgccattgcactct

SEQ ID NO: 105112 - DNA, 80 bp, synthetic construct
  source 1..80: mol_type = other DNA
atttagagtgtgctagatcctttcaagtgcttagagacagaaaccagtcccccagagagccccaaaaagctagaatgttg

SEQ ID NO: 105113 - DNA, 80 bp, synthetic construct; identical to SEQ ID NO: 20284
  source 1..80: mol_type = other DNA

SEQ ID NO: 105114 - DNA, 80 bp, synthetic construct
  source 1..80: mol_type = other DNA
ggagcaggagcctcttactggtttctggatttctcacagggaattggtttgtttgttgctgttggctcagtgtctccatc

SEQ ID NO: 105115 - DNA, 80 bp, synthetic construct
  source 1..80: mol_type = other DNA
tgctcaggatttgacacaggtgagtgagtagagtataaaccacactgtaagaattttaagggagtgcaaaggaaggaaaa

SEQ ID NO: 105116 - DNA, 80 bp, synthetic construct; identical to SEQ ID NO: 20285
  source 1..80: mol_type = other DNA

SEQ ID NO: 105117 - DNA, 80 bp, synthetic construct
  source 1..80: mol_type = other DNA
ggctaatttttgtatttttggtagagacagggtctcgctatgttgctcaggctggtctcgaactcctgaactcaagtaat

SEQ ID NO: 105118 - DNA, 80 bp, synthetic construct
  source 1..80: mol_type = other DNA
attgtaaagatgtttgtggtttgttcatttcagatgcttgctctgtcaaggcacagcctattgtctcctttgctcagtgt

SEQ ID NO: 105119 - DNA, 80 bp, synthetic construct
  source 1..80: mol_type = other DNA
aatgttggaaaactgcattcttcttaggtatgggactaggagtctttttttttaaatcgggcagcttcctgagccagagt

SEQ ID NO: 105120 - DNA, 80 bp, synthetic construct; identical to SEQ ID NO: 20286
  source 1..80: mol_type = other DNA

SEQ ID NO: 105121 - DNA, 80 bp, synthetic construct
  source 1..80: mol_type = other DNA
tgggattacaggcatgtgtcaccacacccgggtaattttatatttttaatagagacagggtttctctgtgttggtcaggc

SEQ ID NO: 105122 - DNA, 80 bp, synthetic construct
  source 1..80: mol_type = other DNA
ttatttgcgagacagagtggaaacttgtttgtctcacttaagcaaaaaggaatttagtggaagggtatatgaagctcaca

SEQ ID NO: 105123 - DNA, 80 bp, synthetic construct
  source 1..80: mol_type = other DNA
atcgcttgaggttaggagcttgagagcagcctggccaacacagcgaaacctcatctctccaaaaattcaaaaattagccg

SEQ ID NO: 105124 - DNA, 80 bp, synthetic construct
  source 1..80: mol_type = other DNA
aaaagtttcattcaggcactacctttatgaggaatgaattctaactgtgtatagttaggattaactttggctatgagtaa

SEQ ID NO: 105125 - DNA, 80 bp, synthetic construct; identical to SEQ ID NO: 20287
  source 1..80: mol_type = other DNA

SEQ ID NO: 105126 - DNA, 80 bp, synthetic construct
  source 1..80: mol_type = other DNA
aataatatagtctattccatctgcccagctgtgttggagattctgttatcgatgaaaactggatattaggggacgtgtca

SEQ ID NO: 105127 - DNA, 80 bp, synthetic construct
  source 1..80: mol_type = other DNA
ccaaatatttactctccaaccctttacagaacaagtttgccctgacttagcataatgcatttgagatgcgtatccttgtt

SEQ ID NO: 105128 - DNA, 80 bp, synthetic construct; identical to SEQ ID NO: 20288
  source 1..80: mol_type = other DNA

SEQ ID NO: 105129 - DNA, 80 bp, synthetic construct
  source 1..80: mol_type = other DNA
taaaaatgcaaaagttagccgcgtgtggtggtgcgcccagctactctggaggctgaggcaagagaatctcttgaatccgg

SEQ ID NO: 105130 - DNA, 80 bp, synthetic construct
  source 1..80: mol_type = other DNA
ctgaggccaggagatcgagaccttcctggctaacacggtgaaaccccgtttctactaaaacgacaaaaaattagctgggt

SEQ ID NO: 105131 - DNA, 80 bp, synthetic construct
  source 1..80: mol_type = other DNA
ttagtacattttttctgtaataggtaaatatagatagtaagctttttctataataggtaaatatagatagtaaatacaga

SEQ ID NO: 105132 - DNA, 80 bp, synthetic construct
  source 1..80: mol_type = other DNA
atactgttttcaccagttatgaaatatacatttgattttttttccccaaccattaaaaaatcattcttggctggatgcag

SEQ ID NO: 105133 - DNA, 80 bp, synthetic construct; identical to SEQ ID NO: 20289
  source 1..80: mol_type = other DNA

SEQ ID NO: 105134 - DNA, 80 bp, synthetic construct
  source 1..80: mol_type = other DNA
accatcttggccaacatggtgaaaccccgtctctactaaaaatactgggcgtggtggtgggcgcctgtaatctcagctac

SEQ ID NO: 105135 - DNA, 80 bp, synthetic construct
  source 1..80: mol_type = other DNA
ttggactccaagaatgtgattctgtttacatgataatctgaaaaaggcaaaacttacagggacaaatcagtgattgccag

SEQ ID NO: 105136 - DNA, 80 bp, synthetic construct
  source 1..80: mol_type = other DNA
gactaataatattgaggatcttttcaagggcttatcagccctttatgtatatttggtgacatgtctcttcaaattccgcc

SEQ ID NO: 105137 - DNA, 80 bp, synthetic construct
  source 1..80: mol_type = other DNA
tacaggccggcagcaccatgcccagctaatttttgttgttgttgtattttttgtggagatgaggttttgccatgttgccc

SEQ ID NO: 105138 - DNA, 80 bp, synthetic construct; identical to SEQ ID NO: 20290
  source 1..80: mol_type = other DNA

SEQ ID NO: 105139 - DNA, 80 bp, synthetic construct
  source 1..80: mol_type = other DNA
gtctgctgtatctttgttcctttttatgtgtcttctctttctgaatcttttcaatattttgtctttggtttctagccgtt

SEQ ID NO: 105140 - DNA, 80 bp, synthetic construct
  source 1..80: mol_type = other DNA
ccctcttttccttctaggattctagttatacttagttaaatggtttaatattgtccaacagctgttgtgggggttttgtt

SEQ ID NO: 105141 - DNA, 80 bp, synthetic construct
  source 1..80: mol_type = other DNA
cctggctaatttttttgtatttttcacagagacgggtttcaccatgttggccaggctgggcttgaactcctggcctcaag

SEQ ID NO: 105142 - DNA, 80 bp, synthetic construct; identical to SEQ ID NO: 20291
  source 1..80: mol_type = other DNA

SEQ ID NO: 105143 - DNA, 80 bp, synthetic construct
  source 1..80: mol_type = other DNA
ttctaacatctgggtcatccctcagtctgcttctgttgatttctttgtcccttgacagtgtgttgtttttttcttctttt

SEQ ID NO: 105144 - DNA, 80 bp, synthetic construct
  source 1..80: mol_type = other DNA
ttgtttttgctttggttaccttcattgcattactagtgtctagcgttaacgtgtgcttagagtggaagctggctctgtcg

SEQ ID NO: 105145 - DNA, 80 bp, synthetic construct
  source 1..80: mol_type = other DNA
tcacccagactggaggcagtggcgcgatatcggctcactgcaagctctgcctcttgggttcatgccattctgctgcctca

SEQ ID NO: 105146 - DNA, 80 bp, synthetic construct; identical to SEQ ID NO: 20292
  source 1..80: mol_type = other DNA

SEQ ID NO: 105147 - DNA, 80 bp, synthetic construct
  source 1..80: mol_type = other DNA
cgattccctaaggaggggtgaaccagcccacgctggaaatgggacaggtcgaaattcctgtgctgatcagtggtggaatt

SEQ ID NO: 105148 - DNA, 80 bp, synthetic construct
  source 1..80: mol_type = other DNA
caggagaccaagaccagcctgactaacacagtgaaaccccatctctactaaaaaaaaaaaaattacaaaaaatcagccga

SEQ ID NO: 105149 - DNA, 80 bp, synthetic construct
  source 1..80: mol_type = other DNA
aaaaatttttttagctgaattccttttacccatttgtatgatgtccagtgtctcttcttcctgtgcctgccacaggtgag

SEQ ID NO: 105150 - DNA, 80 bp, synthetic construct; identical to SEQ ID NO: 20293
  source 1..80: mol_type = other DNA

SEQ ID NO: 105151 - DNA, 80 bp, synthetic construct
  source 1..80: mol_type = other DNA
atcttaaataagtgtcccaagggtgtagagaaaggtcagggggagcagcacactgccagacccactgccgtagactgagg

SEQ ID NO: 105152 - DNA, 80 bp, synthetic construct
  source 1..80: mol_type = other DNA
gacctctaactgatagacaaaggagagagcttttgtttcaagagatatatacattgcaagggaaaacacaatgtctgggg

SEQ ID NO: 105153 - DNA, 80 bp, synthetic construct; identical to SEQ ID NO: 20294
  source 1..80: mol_type = other DNA

SEQ ID NO: 105154 - DNA, 80 bp, synthetic construct
  source 1..80: mol_type = other DNA
agctaaaccagccccagaaatatttgaaaatgaagtcatggccctgctgagagactttgctaaaaacaaaaacaaagagc

SEQ ID NO: 105155 - DNA, 80 bp, synthetic construct
  source 1..80: mol_type = other DNA
cactggtcctgcctcaagtgatggacataaccctctcctaggacatacatgtaaatgcacaatgtgactcattctcatac

SEQ ID NO: 105156 - DNA, 80 bp, synthetic construct
  source 1..80: mol_type = other DNA
cccaagtgtactcaaagaaaagaggcagccagctgtgcgtgctgtatggaaagcctcccgccctccctgcagctccccgc

SEQ ID NO: 105157 - DNA, 80 bp, synthetic construct; identical to SEQ ID NO: 20295
  source 1..80: mol_type = other DNA

SEQ ID NO: 105158 - DNA, 80 bp, synthetic construct
  source 1..80: mol_type = other DNA
ttttttttttgttaataaagtagaataacatttatttcttaaaatttttattatacatgctgtattcatggaaaaccaag

SEQ ID NO: 105159 - DNA, 80 bp, synthetic construct; identical to SEQ ID NO: 20296
  source 1..80: mol_type = other DNA

SEQ ID NO: 105160 - DNA, 80 bp, synthetic construct
  source 1..80: mol_type = other DNA
tgtctaccttttttaacatttgaagatggtcagctccctctggcaagagctctgccacgttgaattccttcttgtgtggc

SEQ ID NO: 105161 - DNA, 80 bp, synthetic construct
  source 1..80: mol_type = other DNA
tcagcatataccagctctcaaaagtatgtggaagaaactaccctctctattaaccctttgtaaaaccatgatgatttcaa

SEQ ID NO: 105162 - DNA, 80 bp, synthetic construct
  source 1..80: mol_type = other DNA
taaaatgagacaagtactcatctgacgttagtgaaggttcccctcattttagaaggataagtctacccccctaaaaaagt

SEQ ID NO: 105163 - DNA, 80 bp, synthetic construct
  source 1..80: mol_type = other DNA
ccggcctcagcctctcaagtaactgaaactacaggtgcgtgccaccacacctggctaattaaaaaaaattttgtttgtag

SEQ ID NO: 105164 - DNA, 80 bp, synthetic construct; identical to SEQ ID NO: 20297
  source 1..80: mol_type = other DNA

SEQ ID NO: 105165 - DNA, 80 bp, synthetic construct
  source 1..80: mol_type = other DNA
atttccccatctgtataaggggattaaacttgatggttttcaagtcccttccagtttcatgatcggcctatgtctatgtc

SEQ ID NO: 105166 - DNA, 80 bp, synthetic construct
  source 1..80: mol_type = other DNA
cagccaggccccaccactgaagatgctatctctgtctcaaacaagcccagtactcatgtttttttaaaaaataacataag

SEQ ID NO: 105167 - DNA, 80 bp, synthetic construct; identical to SEQ ID NO: 20298
  source 1..80: mol_type = other DNA

SEQ ID NO: 105168 - DNA, 80 bp, synthetic construct
  source 1..80: mol_type = other DNA
acacctgctatggtttgaatgtgtccccaaaagctcatgtgttgaaaacctaatccccaatgcaacagtattgagaggtg

SEQ ID NO: 105169 - DNA, 80 bp, synthetic construct
  source 1..80: mol_type = other DNA
aggccagcagttccaggctgcagtgagctatgattgcgccactgcaccccagcctgggcaacacagtgagaccctgtctt

SEQ ID NO: 105170 - DNA, 80 bp, synthetic construct
  source 1..80: mol_type = other DNA
ggcatgagtggtgcctgcctgtaatcccagctactcgggaggcgaatgcaggagaatcacttgaacctgggaggcggagg

SEQ ID NO: 105171 - DNA, 80 bp, synthetic construct; identical to SEQ ID NO: 20299
  source 1..80: mol_type = other DNA

SEQ ID NO: 105172 - DNA, 80 bp, synthetic construct
  source 1..80: mol_type = other DNA
gtgtgctgggaggcaaaatccaggccagagtgagccaaaagcagcagcaaatgcgagcaggaagaggaacgaaagccaga

SEQ ID NO: 105173 - DNA, 80 bp, synthetic construct
  source 1..80: mol_type = other DNA
ttgaacgcaggtacctgctcatgggttcctgtgcatccttaactcccacaatgtccctgtgtagcctacaaataaagcct

SEQ ID NO: 105174 - DNA, 80 bp, synthetic construct
  source 1..80: mol_type = other DNA
gcgtgtcagctctgaggcagagctgagggtcaccagccccacgtaccttaggacaggtccttgtgcagttcatgatggtg

SEQ ID NO: 105175 - DNA, 80 bp, synthetic construct; identical to SEQ ID NO: 20300
  source 1..80: mol_type = other DNA

SEQ ID NO: 105176 - DNA, 80 bp, synthetic construct
  source 1..80: mol_type = other DNA
ttcacattgctcaatagcttcctacccagcttataatttggtgaaggcagggactgtatcatataactcttatctgtctt

SEQ ID NO: 105177 - DNA, 80 bp, synthetic construct
  source 1..80: mol_type = other DNA
ccacttaatgattctttgaacttacacagcgctctcagcagcctgagatcagcaggctgaaacgagttaatcacatgacc

SEQ ID NO: 105178 - DNA, 80 bp, synthetic construct
  source 1..80: mol_type = other DNA
gtgggaaaatgagaaagagaagttggtttttgagttgcctagagtctgtgaaaagcacgtatctaaaaaagcacaagctt

SEQ ID NO: 105179 - DNA, 80 bp, synthetic construct; identical to SEQ ID NO: 20301
  source 1..80: mol_type = other DNA

SEQ ID NO: 105180 - DNA, 80 bp, synthetic construct
  source 1..80: mol_type = other DNA
agaatggctggcttacagcaatctattgtcctcttggacttctggatgcttgagtttcaatttctcttaaagcaattaag

SEQ ID NO: 105181 - DNA, 80 bp, synthetic construct
  source 1..80: mol_type = other DNA
tgctatgtcttcagctgattaaatgttacctttggggtcagtgcatgaacaaagtgcctacttgcatgtgaattttctta

SEQ ID NO: 105182 - DNA, 80 bp, synthetic construct
  source 1..80: mol_type = other DNA
aacacaaaaacaactcccataaattccagcttcctggaatgaggtcaagacgggagagattcaaaagcctaggggctgaa

SEQ ID NO: 105183 - DNA, 80 bp, synthetic construct
  source 1..80: mol_type = other DNA
ccttacacgctttccttaactgatcatcacagtaatcctgtgaggtgactccagcaagttccacttacaggtaaggaacc

SEQ ID NO: 105184 - DNA, 80 bp, synthetic construct; identical to SEQ ID NO: 20302
  source 1..80: mol_type = other DNA

SEQ ID NO: 105185 - DNA, 80 bp, synthetic construct
  source 1..80: mol_type = other DNA
tgtcaactggccccactggtctagaaggcataaggtcacaggattaagagccttaagaatagtcatattctttaacccac

SEQ ID NO: 105186 - DNA, 80 bp, synthetic construct
  source 1..80: mol_type = other DNA
agtgaaatggttttatggcgcatggtgcatacatctgaagcagtagaaagcaaagtgtaagttaatgcttatgaacaatt

SEQ ID NO: 105187 - DNA, 80 bp, synthetic construct
  source 1..80: mol_type = other DNA
tataaattctttttttttttttttttgagacagggtcttgctgtgtgcccctggctggagtgcagtggcacaatcacagt

SEQ ID NO: 105188 - DNA, 80 bp, synthetic construct; identical to SEQ ID NO: 20303
  source 1..80: mol_type = other DNA

SEQ ID NO: 105189 - DNA, 80 bp, synthetic construct
  source 1..80: mol_type = other DNA
ctgaaaatctgaaatccaaaatgttccaaaatctgaaactttttgagcaccaatatgctgctcaaaggaaatgttcactg

SEQ ID NO: 105190 - DNA, 80 bp, synthetic construct
  source 1..80: mol_type = other DNA
tactcaacttgtatctagaaaaccaaacatgctcaggggaactcttcaatccctaataataccacatcagggagatgttc

SEQ ID NO: 105191 - DNA, 80 bp, synthetic construct; identical to SEQ ID NO: 20304
  source 1..80: mol_type = other DNA

SEQ ID NO: 105192 - DNA, 80 bp, synthetic construct
  source 1..80: mol_type = other DNA
actcagctaatttttgtattttcagtaaagatggggttttatcacgttggccaggctggtctcgaacaactgacctcaag

SEQ ID NO: 105193 - DNA, 80 bp, synthetic construct
  source 1..80: mol_type = other DNA
tctcaaaaggtagaattaatttattcattcatacaactgatacttttcatatattcacatatatgtatatgttttagaga

SEQ ID NO: 105194 - DNA, 80 bp, synthetic construct
  source 1..80: mol_type = other DNA
tttacataactaatatttatggataaaataacatgcgccagggcctagggatccagaaaggaagaagacacagccattgc

SEQ ID NO: 105195 - DNA, 80 bp, synthetic construct
  source 1..80: mol_type = other DNA
aagtagtgtagaagaagaaagactgaaaacttgataatgatgcctccgctttaagattttacagcttgtacacaggaatg

SEQ ID NO: 105196 - DNA, 80 bp, synthetic construct; identical to SEQ ID NO: 20305
  source 1..80: mol_type = other DNA

SEQ ID NO: 105197 - DNA, 80 bp, synthetic construct
  source 1..80: mol_type = other DNA
tacactaaatggcttgcatcagcttatgttccctgccaagccacactcctggcaatcatctttgcaataaattcttcaga

SEQ ID NO: 105198 - DNA, 80 bp, synthetic construct
  source 1..80: mol_type = other DNA
tcttctatggactgcagatactgctgcttgccttcctgagattcatccttcttcttcaaataaggctcaatggatttgta

SEQ ID NO: 105199 - DNA, 80 bp, synthetic construct; identical to SEQ ID NO: 20306
  source 1..80: mol_type = other DNA

SEQ ID NO: 105200 - DNA, 80 bp, synthetic construct
  source 1..80: mol_type = other DNA
ccaactggcattttccacatgatttctttgtagttatggccaaattattcatttctgggaatgttccaattctaaaattc

SEQ ID NO: 105201 - DNA, 80 bp, synthetic construct
  source 1..80: mol_type = other DNA
gccataatataggaaacagtcccatctatttactatctgactagaagaggagccttaaatactcaaacaaatcctgccct

SEQ ID NO: 105202 - DNA, 80 bp, synthetic construct
  source 1..80: mol_type = other DNA
gtgcaagctagagtgttgcctccattgatgttcattgcacaagagccacagatgcctgaaagagacacacatttaacaca

SEQ ID NO: 105203 - DNA, 80 bp, synthetic construct; identical to SEQ ID NO: 20307
  source 1..80: mol_type = other DNA

SEQ ID NO: 105204 - DNA, 80 bp, synthetic construct
  source 1..80: mol_type = other DNA
gtggtgcaatcacagctcactgcagtcctcaatgcctgagctcaagtgatcctcccacctcagcctcctaagtagctggg

SEQ ID NO: 105205 - DNA, 80 bp, synthetic construct
  source 1..80: mol_type = other DNA
tctgggccaccacacacccgtcaagcctattttttttttttttctttgagaaggagttttgctcttgttgcccaggctgg

SEQ ID NO: 105206 - DNA, 80 bp, synthetic construct
  source 1..80: mol_type = other DNA
atacccaaaagtaaagtaaatcaacattgtcttggtcatcttaaggttgaagtgacctggatacagattattaagagata

SEQ ID NO: 105207 - DNA, 80 bp, synthetic construct; identical to SEQ ID NO: 20308
  source 1..80: mol_type = other DNA

SEQ ID NO: 105208 - DNA, 80 bp, synthetic construct
  source 1..80: mol_type = other DNA
aaggttgcagtgagcagagatcgcgccactgcactccagcctgggtgacagagcaagattccatctcaaaaaaaagaaaa

SEQ ID NO: 105209 - DNA, 80 bp, synthetic construct
  source 1..80: mol_type = other DNA
ataaaatacgcagcatagtaccctggggctatgaaatccacaaaagctgactcagcatggactttccaaagaggagaaga

SEQ ID NO: 105210 - DNA, 80 bp, synthetic construct
  source 1..80: mol_type = other DNA
ctagtgccagtcctctgaagctgttttttgaagatcattaggtcagagaaacctgattgcttgagaaagttgcactggtt

SEQ ID NO: 105211 - DNA, 80 bp, synthetic construct
  source 1..80: mol_type = other DNA
tggctaatttttgtatttttagtagagacggggttttaccacgttggtcaggctggtctcgaactctgaccttgtgatct

SEQ ID NO: 105212 - DNA, 80 bp, synthetic construct; identical to SEQ ID NO: 20309
  source 1..80: mol_type = other DNA

SEQ ID NO: 105213 - DNA, 80 bp, synthetic construct
  source 1..80: mol_type = other DNA
aaaggctccctgggaattctcttacaagatgggaattaaaaaaaaaataagaaaaacaagatgggaataaaaaggagtag

SEQ ID NO: 105214 - DNA, 80 bp, synthetic construct
  source 1..80: mol_type = other DNA
tgttccctgaacagcaggactcagccgaactatcataatatccatcagcatttgcaacgctaaataagattagctgaatc

SEQ ID NO: 105215 - DNA, 80 bp, synthetic construct
  source 1..80: mol_type = other DNA
tatcccaggtgttccaagccaagtcagtgcctgagagagcagatctggagtctggagtctgacagctttggctgactccc

SEQ ID NO: 105216 - DNA, 80 bp, synthetic construct; identical to SEQ ID NO: 20310
  source 1..80: mol_type = other DNA

SEQ ID NO: 105217 - DNA, 80 bp, synthetic construct
  source 1..80: mol_type = other DNA
tccacctcccgggttcctgcctcagcctcccgagtagccaggattacaggcgtccgctatcacgcccggctaatttttgt

SEQ ID NO: 105218 - DNA, 80 bp, synthetic construct
  source 1..80: mol_type = other DNA
attgctattcatgtagaaaatgttagtctgcacactgcctcaaatgggctcatgtggcaccagcagcacaagtaaccaca

SEQ ID NO: 105219 - DNA, 80 bp, synthetic construct; identical to SEQ ID NO: 20311
  source 1..80: mol_type = other DNA

SEQ ID NO: 105220 - DNA, 80 bp, synthetic construct
  source 1..80: mol_type = other DNA
ggtcaaagtagagtcaacttcattcttaatcttgattaaagcatccaataccatggggccacatctaacaaagaaaaata

SEQ ID NO: 105221 - DNA, 80 bp, synthetic construct
  source 1..80: mol_type = other DNA
agttctattttgatgatcacagtgcaaacacatttctaggaaatggaaagctaaagtagtagtagacaagtatgacacaa

SEQ ID NO: 105222 - DNA, 80 bp, synthetic construct
  source 1..80: mol_type = other DNA
gaataaaagacacccaatcactcacagtcccccagtcaaatcactgtgagcctcctagaacatacaagggcagtgacatg

SEQ ID NO: 105223 - DNA, 80 bp, synthetic construct; identical to SEQ ID NO: 20312
  source 1..80: mol_type = other DNA

SEQ ID NO: 105224 - DNA, 80 bp, synthetic construct
  source 1..80: mol_type = other DNA
ttttctggttgccaccctgcccccattccactcactaattttctatgcatgagattaaaaatatacttaaaaatacgtca

SEQ ID NO: 105225 - DNA, 80 bp, synthetic construct
  source 1..80: mol_type = other DNA
gactacaggtatgtgccaccacatccagcttaatttttgtatttttttgtagaggtgggatttcgccatgttgcccaggc

SEQ ID NO: 105226 - DNA, 80 bp, synthetic construct
  source 1..80: mol_type = other DNA
aggtgcatgccaccacacccggcaaatttttgtatttttagtagagataggttttcccatgttggccaggctggtctcaa

SEQ ID NO: 105227 - DNA, 80 bp, synthetic construct
  source 1..80: mol_type = other DNA
acctttgctattctgatactggagaagtgttattgttttcagtgttttaaatcgagacttttgaatactacataggttga

SEQ ID NO: 105228 - DNA, 80 bp, synthetic construct; identical to SEQ ID NO: 20313
  source 1..80: mol_type = other DNA

SEQ ID NO: 105229 - DNA, 80 bp, synthetic construct
  source 1..80: mol_type = other DNA
gctattctttcttttataacattatctatcacttttaagcctaaacagaccactgcccttcctgaggtctgataaatact

SEQ ID NO: 105230 - DNA, 80 bp, synthetic construct
  source 1..80: mol_type = other DNA
ttttgttgctacatttttattctaatgatctgcctgttcttgtcctagcatattttaaatgacaacaacatctttgtttt

SEQ ID NO: 105231 - DNA, 80 bp, synthetic construct
  source 1..80: mol_type = other DNA
gaaaccgtctctactaaaaatacaaaaaattagctgggtgtggttgcacgtgcctgtagtcccaattacttgggaggctg

SEQ ID NO: 105232 - DNA, 80 bp, synthetic construct; identical to SEQ ID NO: 20314
  source 1..80: mol_type = other DNA

SEQ ID NO: 105233 - DNA, 80 bp, synthetic construct
  source 1..80: mol_type = other DNA
atgaatctggaaatcaatttggagaccactgcctccttaacaacattaagtcttccaacccacaaacagggcatgtcttt

SEQ ID NO: 105234 - DNA, 80 bp, synthetic construct
  source 1..80: mol_type = other DNA
gtgcagtgttgtgatcacagctcactgcaggtttgacctcccaggctcaagtgattctcccacctcagcctccaagtagc

SEQ ID NO: 105235 - DNA, 80 bp, synthetic construct; identical to SEQ ID NO: 20315
  source 1..80: mol_type = other DNA

SEQ ID NO: 105236 - DNA, 80 bp, synthetic construct
  source 1..80: mol_type = other DNA
aagtcttgctattgttgcccaggctggtctcaaaactcctggcctcaagcaatcctcctgccttggcctcacaaagaaag

SEQ ID NO: 105237 - DNA, 80 bp, synthetic construct
  source 1..80: mol_type = other DNA
ggtttcagagtcggattagaaggaaatagaactataattaaaacatggtacaatataaaatgaagactgacagacatagg

SEQ ID NO: 105238 - DNA, 80 bp, synthetic construct
  source 1..80: mol_type = other DNA
acagcgtctccctctgttgcccaggctggagtgtagggcatggaatcatggctcactgcagcctcgacctcctgggttca

SEQ ID NO: 105239 - DNA, 80 bp, synthetic construct
  source 1..80: mol_type = other DNA
ttcttgtgccttagccttccaagaagctgggattacaggtgtgtgctaccatgcctggctaatttttgtatttttagtag

SEQ ID NO: 105240 - DNA, 80 bp, synthetic construct; identical to SEQ ID NO: 20316
  source 1..80: mol_type = other DNA

SEQ ID NO: 105241 - DNA, 80 bp, synthetic construct
  source 1..80: mol_type = other DNA
gacaggagaattgcttgaatccgggaggcggaggttgcggtgagccaagattgtgccattgcactccagcctgggcaaca

SEQ ID NO: 105242 - DNA, 80 bp, synthetic construct
  source 1..80: mol_type = other DNA
ctttctttttctcacccaatttccctggctaagcctccagtaaaattttgaatggctgatgttagcataaatagaattat

SEQ ID NO: 105243 - DNA, 80 bp, synthetic construct; identical to SEQ ID NO: 20317
  source 1..80: mol_type = other DNA

SEQ ID NO: 105244 - DNA, 80 bp, synthetic construct
  source 1..80: mol_type = other DNA
ttcccttcttttcctattagcagttattatttaagtaaaattaggactattccttttaattcaaattccttatagtttta

SEQ ID NO: 105245 - DNA, 80 bp, synthetic construct
  source 1..80: mol_type = other DNA
cattgattttcaaatgtatttctttattttttcttgcgctttttcttgcacttaaaacagcatatggttgggttttgctt

SEQ ID NO: 105246 - DNA, 80 bp, synthetic construct
  source 1..80: mol_type = other DNA
gtaatatttttagactaagtaaatatttttagaaatcaattttaatttatatattggctttttagctatatctctttgca

SEQ ID NO: 105247 - DNA, 80 bp, synthetic construct
  source 1..80: mol_type = other DNA
ccaggcatagtggtacatgcctgtagtcccagggacatgggaggctgaggtgggaggattgcttgagcctaggaggtctc

SEQ ID NO: 105248 - DNA, 80 bp, synthetic construct; identical to SEQ ID NO: 20318
  source 1..80: mol_type = other DNA

SEQ ID NO: 105249 - DNA, 80 bp, synthetic construct
  source 1..80: mol_type = other DNA
ttttctaagagccaagtttccacctggtattatttttcctcagcctgactaacttcctatagcatttcatgtagtactgg

SEQ ID NO: 105250 - DNA, 80 bp, synthetic construct
  source 1..80: mol_type = other DNA
ctttaaagatggtatttcactgtctcttggcctctagtttctgatgagaagtcagcaatttttcacctggtttccttgta

SEQ ID NO: 105251 - DNA, 80 bp, synthetic construct
  source 1..80: mol_type = other DNA
ggcatagttttatttttatttacctagttggggttcactaagcttcttggatatgtgaattatgtctttcatgggctcag

SEQ ID NO: 105252 - DNA, 80 bp, synthetic construct; identical to SEQ ID NO: 20319
  source 1..80: mol_type = other DNA

SEQ ID NO: 105253 - DNA, 80 bp, synthetic construct
  source 1..80: mol_type = other DNA
cctagaccttttgatgctgttccatagatcacaggagcgctttcccttttcaaaaatctttctttttcttaagaacagat

SEQ ID NO: 105254 - DNA, 80 bp, synthetic construct
  source 1..80: mol_type = other DNA
cgtctgtaatcccagctactcaggaggctgaggtgggagaatcgcttgagcctggaaggcagaggttgcagtgagccaag

SEQ ID NO: 105255 - DNA, 80 bp, synthetic construct
  source 1..80: mol_type = other DNA
aattttccttttcaaatattatatttttcagtactagattttccatttggcttttcaatagtttctacttctccactgaa

SEQ ID NO: 105256 - DNA, 80 bp, synthetic construct; identical to SEQ ID NO: 20320
  source 1..80: mol_type = other DNA

SEQ ID NO: 105257 - DNA, 80 bp, synthetic construct
  source 1..80: mol_type = other DNA
gcattatgtttttctgaaaagtgtggattttaaaattttacacaggcaattaatatggctgcacgcaagatgtgggcaga

SEQ ID NO: 105258 - DNA, 80 bp, synthetic construct
  source 1..80: mol_type = other DNA
cccaggctggagtgcagtggtgtgatcttggctcactgcaacctccgcctcccatgttcaagtgattctcccccattagc

SEQ ID NO: 105259 - DNA, 80 bp, synthetic construct; identical to SEQ ID NO: 20321
  source 1..80: mol_type = other DNA

SEQ ID NO: 105260 - DNA, 80 bp, synthetic construct
  source 1..80: mol_type = other DNA
ttgtaggagggttagtctgatgagagctactgtgacaaaactggaagtaaacccaaagattctttaaattttttatcact

SEQ ID NO: 105261 - DNA, 80 bp, synthetic construct
  source 1..80: mol_type = other DNA
gtggcatgtgcctatagtcccagttactcaggaggatgaggcaggtggattgcttgagcctgggaggttgaggctacagt

SEQ ID NO: 105262 - DNA, 80 bp, synthetic construct
  source 1..80: mol_type = other DNA
cgtgttcctgatcaaatagttagaagtgtacttttttttagtttctaagcagtagggttttttgttttatgagttttttt

SEQ ID NO: 105263 - DNA, 80 bp, synthetic construct
  source 1..80: mol_type = other DNA
cagcttatttttatattttagtagagatggggtttcaccatgttggccaggctagtcttgaatgcctgaccccgagtgat

SEQ ID NO: 105264 - DNA, 80 bp, synthetic construct; identical to SEQ ID NO: 20322
  source 1..80: mol_type = other DNA

SEQ ID NO: 105265 - DNA, 80 bp, synthetic construct
  source 1..80: mol_type = other DNA
caggaggctagagactaacttgctagattctttcttttctttggctaactgtggagttccttaaaagtgaaagatgttgg

SEQ ID NO: 105266 - DNA, 80 bp, synthetic construct
  source 1..80: mol_type = other DNA
ctcacaaccacaaggaactgcattccaccaatagcgcaaatgagcaaaaaatattttcctctaggctccagaaaggaatg

SEQ ID NO: 105267 - DNA, 80 bp, synthetic construct; identical to SEQ ID NO: 20323
  source 1..80: mol_type = other DNA

SEQ ID NO: 105268 - DNA, 80 bp, synthetic construct
  source 1..80: mol_type = other DNA
ttataccagtatttctagaaatttgtcatactttcatttgggaattattttggtattattcttctgaatcaggtaacaac

SEQ ID NO: 105269 - DNA, 80 bp, synthetic construct
  source 1..80: mol_type = other DNA
acccagctaatttctgtatttttagtagagaggggagtttcaccatgttggccacattggtcttgaactcccaacctcag

SEQ ID NO: 105270 - DNA, 80 bp, synthetic construct
  source 1..80: mol_type = other DNA
aactctccttcaatagctggctttcacagagatactcacttattaaggtcaacttcataagtctgcatatgaggtttgtc

SEQ ID NO: 105271 - DNA, 80 bp, synthetic construct
  source 1..80: mol_type = other DNA
cagatgtaacgctggatataaactcacacattactgacacataatcttcttagaaaaggcaggcattcaatatccaacaa

SEQ ID NO: 105272 - DNA, 80 bp, synthetic construct; identical to SEQ ID NO: 20324
  source 1..80: mol_type = other DNA

SEQ ID NO: 105273 - DNA, 80 bp, synthetic construct
  source 1..80: mol_type = other DNA
catctctacaaaaaataaaaaaattagctgggtgtcgtagtgtgcgtctcaggaggcagaagtgggaggactgcttgggc

SEQ ID NO: 105274 - DNA, 80 bp, synthetic construct
  source 1..80: mol_type = other DNA
agtaaaaactcggaaggttaattgactaattacaaaaagatgcagtggtgtttattactgaggcaggagaacagggttta

SEQ ID NO: 105275 - DNA, 80 bp, synthetic construct
  source 1..80: mol_type = other DNA
catgctaaaaaccttgacgacttgtggtcaagaccgtctaccagtaacattatttcttggtaaagtgtcccgtattaact

SEQ ID NO: 105276 - DNA, 80 bp, synthetic construct; identical to SEQ ID NO: 20325
  source 1..80: mol_type = other DNA

SEQ ID NO: 105277 - DNA, 80 bp, synthetic construct
  source 1..80: mol_type = other DNA
tttccatccaaaaaggtcttttgtgcccttgatggcaaacataagtccccttttcctacccttagcaactgatcagctat

SEQ ID NO: 105278 - DNA, 80 bp, synthetic construct
  source 1..80: mol_type = other DNA
catcacgagtctgccttttacagaattcatataaatggcatcatacggtacgtagtctcatgtctagcttctttcactca

SEQ ID NO: 105279 - DNA, 80 bp, synthetic construct
  source 1..80: mol_type = other DNA
cgagtagctgggattacaggcatgtgctaccaggcccggctaattttgtatttttagtagagatgtggtttgtctatgtt

SEQ ID NO: 105280 - DNA, 80 bp, synthetic construct
  source 1..80: mol_type = other DNA
tgcagtggctcacacctgtatcccagtactttgggaggccaagacagacgaatcacttgaggtcaggagttcaagaccag

SEQ ID NO: 105281 - DNA, 80 bp, synthetic construct; identical to SEQ ID NO: 20326
  source 1..80: mol_type = other DNA

SEQ ID NO: 105282 - DNA, 80 bp, synthetic construct
  source 1..80: mol_type = other DNA
aatcccagctactagggaggctgaggcaggagaatggcttgaacttgggaggtaaaggttgcagtgagctaagactgtgc

SEQ ID NO: 105283 - DNA, 80 bp, synthetic construct
  source 1..80: mol_type = other DNA
gtagctaggactacaggcatgcgccaccatgcccagttagtttttttacatttatttttgtagagataggggtctcactg

SEQ ID NO: 105284 - DNA, 80 bp, synthetic construct; identical to SEQ ID NO: 20327
  source 1..80: mol_type = other DNA

SEQ ID NO: 105285 - DNA, 80 bp, synthetic construct
  source 1..80: mol_type = other DNA
ctccggagattcatccaagttgctgtgtacagcaatagcttttttcttgttatagctgagtagcactccaaggtatcatg

SEQ ID NO: 105286 - DNA, 80 bp, synthetic construct
  source 1..80: mol_type = other DNA
ctgtatggtagctacaagtttagttttttttaagcaactgacaaaactattttccagagtgggtggctgctgtgcctgag

SEQ ID NO: 105287 - DNA, 80 bp, synthetic construct
  source 1..80: mol_type = other DNA
gtacaatggcgcgatctcggctcactgcaacctccacctcccgacttcaagtgattcttctgcctcagcctcctgagtag

SEQ ID NO: 105288 - DNA, 80 bp, synthetic construct; identical to SEQ ID NO: 20328
  source 1..80: mol_type = other DNA

SEQ ID NO: 105289 - DNA, 80 bp, synthetic construct
  source 1..80: mol_type = other DNA
cagcctcccaaagtgttgggattacaggtgtgagccattgtgtctggccctaacttggacttttttttttcttttttgga

SEQ ID NO: 105290 - DNA, 80 bp, synthetic construct
  source 1..80: mol_type = other DNA
cagacaaggttttgccatttggccaggctgggctcaaactcctggcctcaagtgatccacctgcctcagcgttccaaagt

SEQ ID NO: 105291 - DNA, 80 bp, synthetic construct
  source 1..80: mol_type = other DNA
agatctctctgcctcctgggttcaagcaattctcctgcctcagcctcccaagtagctgggattacaggcgcgtgtcacac

SEQ ID NO: 105292 - DNA, 80 bp, synthetic construct; identical to SEQ ID NO: 20329
  source 1..80: mol_type = other DNA

SEQ ID NO: 105293 - DNA, 80 bp, synthetic construct
  source 1..80: mol_type = other DNA
tatcatatgaatgatgtgaaataagagcaatgccaggatgtactacactgaatatctaagtcgacatatcccaacatcag

SEQ ID NO: 105294 - DNA, 80 bp, synthetic construct
  source 1..80: mol_type = other DNA
agttcgagatcagcctggccaacacggtgaaaccccgtctctactaaaaatacaaaaaaattagacaggcacgatggcgg

SEQ ID NO: 105295 - DNA, 80 bp, synthetic construct; identical to SEQ ID NO: 20330
  source 1..80: mol_type = other DNA

SEQ ID NO: 105296 - DNA, 80 bp, synthetic construct
  source 1..80: mol_type = other DNA
ataatctctaatctttataacatctctatgaaaaatgttttgttgttcccagttaaaagacgaggataggatcatatagc

SEQ ID NO: 105297 - DNA, 80 bp, synthetic construct
  source 1..80: mol_type = other DNA
gatttttttccccttgttacctgcccagcaatttatactacaaatccaaaaggaaagagggccccttgaaagcattttta

SEQ ID NO: 105298 - DNA, 80 bp, synthetic construct
  source 1..80: mol_type = other DNA
ataatttaagcaaggtaagcaacaactgaactgagaagggtgaattctgaatggtgctgaaggctggttgttgttcctcc

SEQ ID NO: 105299 - DNA, 80 bp, synthetic construct; identical to SEQ ID NO: 20331
  source 1..80: mol_type = other DNA

SEQ ID NO: 105300 - DNA, 80 bp, synthetic construct
  source 1..80: mol_type = other DNA
tatcagtctttgtattattctgatttgtaaataggtatcctagccctgccagcctaaggaacaagatgcacattttttaa

SEQ ID NO: 105301 - DNA, 80 bp, synthetic construct
  source 1..80: mol_type = other DNA
cagctaattttttttttatttttttagtagagacggggtttcaccatgttggccgggctggtcttgaactcctgacctca

SEQ ID NO: 105302 - DNA, 80 bp, synthetic construct
  source 1..80: mol_type = other DNA
gtcaaatacttacaggcagaattgtggttcagtggtcagactataagcataaaaagaattcagaacctgaacctgaatgt

SEQ ID NO: 105303 - DNA, 80 bp, synthetic construct
  source 1..80: mol_type = other DNA
caggaggccctgcaaagaccttgcctggaattacaaaaatgacctatgaaattagccttttctacaatgcattcttagaa

SEQ ID NO: 105304 - DNA, 80 bp, synthetic construct; identical to SEQ ID NO: 20332
  source 1..80: mol_type = other DNA

SEQ ID NO: 105305 - DNA, 80 bp, synthetic construct
  source 1..80: mol_type = other DNA
aagatgaaagatgtcctcatttaagtgcaagagaggaagaggaactaaaatttcttggacaccaaccatgtcccaagatc

SEQ ID NO: 105306 - DNA, 80 bp, synthetic construct
  source 1..80: mol_type = other DNA
gggttgttgagaatcccagaagaggaacagacttagaaaggatttgcaaatccttagtcccttatgtatacaaaagcaat

SEQ ID NO: 105307 - DNA, 80 bp, synthetic construct; identical to SEQ ID NO: 20333
  source 1..80: mol_type = other DNA

SEQ ID NO: 105308 - DNA, 80 bp, synthetic construct
  source 1..80: mol_type = other DNA
aattacctcgcttcccaattcccatccttcacaccccgcaggtctcccttttctacagaggcgatagtttggtggcagaa

SEQ ID NO: 105309 - DNA, 80 bp, synthetic construct
  source 1..80: mol_type = other DNA
ctgtaaaaaattgcccgtgccctaactcacaagctgctgcgaggcgcagaaagataacttgacagggatgctcgaagcca

SEQ ID NO: 105310 - DNA, 80 bp, synthetic construct
  source 1..80: mol_type = other DNA
tccctctctgaggctccaggactcacctgcaggcaggctccgccaagggttgtggccggcaaccggcgcctcaaggagag

SEQ ID NO: 105311 - DNA, 80 bp, synthetic construct
  source 1..80: mol_type = other DNA
aactgtttatcctgtgcctgggcagggaaaggacccatgggtgtggaggccaagcgctcggggatcctagagaccccttt

SEQ ID NO: 105312 - DNA, 80 bp, synthetic construct; identical to SEQ ID NO: 20334
  source 1..80: mol_type = other DNA

SEQ ID NO: 105313 - DNA, 80 bp, synthetic construct
  source 1..80: mol_type = other DNA
gcaacccggggaattcatttttagttaatcattttacttgggagggagagtgagtgtcccagtttttctctaaaatgtga

SEQ ID NO: 105314 - DNA, 80 bp, synthetic construct
  source 1..80: mol_type = other DNA
caaatcccagcatagttttgtgccagccttatttttggaaattgtttgttatggaaagttagcttcaatgctgttgagat

SEQ ID NO: 105315 - DNA, 80 bp, synthetic construct
  source 1..80: mol_type = other DNA
atctccatatgtatcttctgtctaaggtatgccaaggcttgtcttgccagtgctgtcttctttattccagatggtttgac

SEQ ID NO: 105316 - DNA, 80 bp, synthetic construct; identical to SEQ ID NO: 20335
  source 1..80: mol_type = other DNA

SEQ ID NO: 105317 - DNA, 80 bp, synthetic construct
  source 1..80: mol_type = other DNA
ctgagttcccttagtatttattgatcattattgggtgtttctcggagagggggatgtggcagggtcataggataatagtg

SEQ ID NO: 105318 - DNA, 80 bp, synthetic construct
  source 1..80: mol_type = other DNA
atatacaatcgggttttacaccgagacattccattgcccagggatgatcaggagacagatgccttcctcttgtctcaact

SEQ ID NO: 105319 - DNA, 80 bp, synthetic construct
  source 1..80: mol_type = other DNA
agattagggagtggtgacgactcttaatgagcatgctgccttcaagcatttgtttaacaaagcacatcttgcacagccct

SEQ ID NO: 105320 - DNA, 80 bp, synthetic construct; identical to SEQ ID NO: 20336
  source 1..80: mol_type = other DNA

SEQ ID NO: 105321 - DNA, 80 bp, synthetic construct
  source 1..80: mol_type = other DNA
ggaaaataccttctgagaaatcctaggagctgatttctggttctacatttattttggacaagtcaaggtcattgattcca

SEQ ID NO: 105322 - DNA, 80 bp, synthetic construct
  source 1..80: mol_type = other DNA
ttgggcccacttaagagaaatattggttaaacttttctttttgttctttttttgggggtctctttttttttggttctttt

SEQ ID NO: 105323 - DNA, 80 bp, synthetic construct
  source 1..80: mol_type = other DNA
caccacgcctggctaatttttgtatttttagtagagacggggtttcaccatcttggccaggctggtcttaaattcctgac

SEQ ID NO: 105324 - DNA, 80 bp, synthetic construct; identical to SEQ ID NO: 20337
  source 1..80: mol_type = other DNA

SEQ ID NO: 105325 - DNA, 80 bp, synthetic construct
  source 1..80: mol_type = other DNA
aagcgattctcctggctcagcctcccaagcagctaggactacaggcgtgtgccaccatgccaggctaattttgtattttt

SEQ ID NO: 105326 - DNA, 80 bp, synthetic construct
  source 1..80: mol_type = other DNA
aacaacataataacataataataacaattgtggctgggcatggtggctcatgcctgtaatcccagcactttgggaggctg

SEQ ID NO: 105327 - DNA, 80 bp, synthetic construct
  source 1..80: mol_type = other DNA
ggcggaggttgcagtgagctgagatcatgccactgcactgcagcctgggcaacagagcaagactccatctcaaaaaaaaa

SEQ ID NO: 105328 - DNA, 80 bp, synthetic construct; identical to SEQ ID NO: 20338
  source 1..80: mol_type = other DNA

SEQ ID NO: 105329 - DNA, 80 bp, synthetic construct
  source 1..80: mol_type = other DNA
aagtcaccaagagtcattaactatctggccagtactcattgtattaaatgccgtatgtgaaatgcccctaaatattaagg

SEQ ID NO: 105330 - DNA, 80 bp, synthetic construct
  source 1..80: mol_type = other DNA
gccagcactttgggaggccgaggcgggaggatcacctgaggtcaggagttcaagaccagcctgaccaacatggagaaacc

SEQ ID NO: 105331 - DNA, 80 bp, synthetic construct
  source 1..80: mol_type = other DNA
gtgacaagagcaaaactccatttcaaaaacaaacaaaaaacagaaacaaaattagctaggtttggaggcacatgcctgta

SEQ ID NO: 105332 - DNA, 80 bp, synthetic construct; identical to SEQ ID NO: 20339
  source 1..80: mol_type = other DNA

SEQ ID NO: 105333 - DNA, 80 bp, synthetic construct
  source 1..80: mol_type = other DNA
cagtggtgtgatcttggctcactgcaacctctgcctcctgggttcaagtgattctcctacctcagccacccgggtagctg

SEQ ID NO: 105334 - DNA, 80 bp, synthetic construct
  source 1..80: mol_type = other DNA
cggcccttaggaattgagttttgaaggatgagtttaacaggctctgagggaggctctattcagagaacagcatgagcaaa

SEQ ID NO: 105335 - DNA, 80 bp, synthetic construct
  source 1..80: mol_type = other DNA
gaagtgcgttgtttgcccacagtttggatcttatactgtaagcagcgggaaattgttaaagacttttaggcaggagaatg

SEQ ID NO: 105336 - DNA, 80 bp, synthetic construct; identical to SEQ ID NO: 20340
  source 1..80: mol_type = other DNA

SEQ ID NO: 105337 - DNA, 80 bp, synthetic construct
  source 1..80: mol_type = other DNA
actcattatattacagtcatataatgtatgactataataagataaattatagtcacatcttgttttggactaaaaatggt

SEQ ID NO: 105338 - DNA, 80 bp, synthetic construct
  source 1..80: mol_type = other DNA
atatatgtggtgtattgtagtttagacaatgctttcctgtatgttttcttgtgcagtcccctcagcaaccaataaggtag

SEQ ID NO: 105339 - DNA, 80 bp, synthetic construct
  source 1..80: mol_type = other DNA
actgcaacctctgcctcgcgggttcaagcgattctcctgcctcagcctcccgagtagctgggatcacaggcgtgcgccac

SEQ ID NO: 105340 - DNA, 80 bp, synthetic construct
  source 1..80: mol_type = other DNA
cttcccaatgttatttttacattaccattgctgccccaatccagagaagagtttcaaaaatgatttcagcaatgattaca

SEQ ID NO: 105341 - DNA, 80 bp, synthetic construct; identical to SEQ ID NO: 20341
  source 1..80: mol_type = other DNA

SEQ ID NO: 105342 - DNA, 80 bp, synthetic construct
  source 1..80: mol_type = other DNA
gtattcacctcttgccttcaaagctggaaagagggaagagctgaagaaggaagtgttcgttagatttttttcctttaaat

SEQ ID NO: 105343 - DNA, 80 bp, synthetic construct
  source 1..80: mol_type = other DNA
agtgggcccttctagtgtactaatatgaagcttttgaaaagtttgtgcatctaatatcaatggtgtgagggacatcatga

SEQ ID NO: 105344 - DNA, 80 bp, synthetic construct
  source 1..80: mol_type = other DNA
acaatgatgtgactgaaggatataatgatgtgactgaagggtataatggtcgtgtgtttttcatagtacacaatgaacat

SEQ ID NO: 105345 - DNA, 80 bp, synthetic construct; identical to SEQ ID NO: 20342
  source 1..80: mol_type = other DNA

SEQ ID NO: 105346 - DNA, 80 bp, synthetic construct
  source 1..80: mol_type = other DNA
aattacatgaaagactttttgacttgaaattcattcaggatatctggagtttgactgatgttagttcctgaaatgaacta

SEQ ID NO: 105347 - DNA, 80 bp, synthetic construct
  source 1..80: mol_type = other DNA
ggctcaagtgatactcccacctcagcctccagagtagctcgtattataggtgtgcactaccacacccaactaattttcat

SEQ ID NO: 105348 - DNA, 80 bp, synthetic construct; identical to SEQ ID NO: 20343
  source 1..80: mol_type = other DNA

SEQ ID NO: 105349 - DNA, 80 bp, synthetic construct
  source 1..80: mol_type = other DNA
ccattctctcgcctcagcctcctgagtagctgggattacaggcatgcgccaccacgcctggctaattttttgtattttta

SEQ ID NO: 105350 - DNA, 80 bp, synthetic construct
  source 1..80: mol_type = other DNA
gaacattaccaactctgattattcttattcttttgtcttgcattatttgtgtttgattaactctattttgcatttttagg

SEQ ID NO: 105351 - DNA, 80 bp, synthetic construct
  source 1..80: mol_type = other DNA
tgtgtattgatttttgattctcttatcttgcagacacgttggtcgtcattgcctccgagcccactttagccctcagctct

SEQ ID NO: 105352 - DNA, 80 bp, synthetic construct
  source 1..80: mol_type = other DNA
gagtagctgggactacaggcgcccaccaccacgcctggctaatttttttgtatttttagtagagacagggtttcaccgtg

SEQ ID NO: 105353 - DNA, 80 bp, synthetic construct; identical to SEQ ID NO: 20344
  source 1..80: mol_type = other DNA

SEQ ID NO: 105354 - DNA, 80 bp, synthetic construct
  source 1..80: mol_type = other DNA
agccattgcacctggactttcatggtgtatatttattctcagcctgttgatgtcaacaattgcctttgtgttatttttta

SEQ ID NO: 105355 - DNA, 80 bp, synthetic construct
  source 1..80: mol_type = other DNA
ttatttttgtaggtcaaaactggtaaaatattaatgatttagtgtagttcagccgaatacatatttaattattagtattt

SEQ ID NO: 105356 - DNA, 80 bp, synthetic construct; identical to SEQ ID NO: 20345
  source 1..80: mol_type = other DNA

SEQ ID NO: 105357 - DNA, 80 bp, synthetic construct
  source 1..80: mol_type = other DNA
ggaggctaaggcaggaagatggcttgagtccagcagttcaaggttgtggtgagctatgatcatgccactgcactccagcc

SEQ ID NO: 105358 - DNA, 80 bp, synthetic construct
  source 1..80: mol_type = other DNA
caataaataaataaataaataaataaataagaaacagctatcctcaacaatttagtaggctgggcatggtggctcatgcc

SEQ ID NO: 105359 - DNA, 80 bp, synthetic construct
  source 1..80: mol_type = other DNA
gaggtagaaggatcacctggatggggcaatggagaattgtgcatagcctgagcatggctgtttaatagttggtttcaacc

SEQ ID NO: 105360 - DNA, 80 bp, synthetic construct; identical to SEQ ID NO: 20346
  source 1..80: mol_type = other DNA

SEQ ID NO: 105361 - DNA, 80 bp, synthetic construct
  source 1..80: mol_type = other DNA
ctgaaaccccatcttgactgaaaatacaaaaattagctgggcgcggtggcatgtgcctgtagtcccagctactcaggagg

SEQ ID NO: 105362 - DNA, 80 bp, synthetic construct
  source 1..80: mol_type = other DNA
taactgaattaaagttggtataaaaataagataagtggaggaacatgttttcctaatactgtgggtttatccagcccacc

SEQ ID NO: 105363 - DNA, 80 bp, synthetic construct
  source 1..80: mol_type = other DNA
tactcaattatatagtagggtgtcctcagaaagcaagtgggggaacatgctgtctttgagtttctttttttcttctctct

SEQ ID NO: 105364 - DNA, 80 bp, synthetic construct
  source 1..80: mol_type = other DNA
tcagcctcctaagtagccggaattacaggtgtgcaccaccacgcctagctaatttttgtatttttaatagagatggagtt

SEQ ID NO: 105365 - DNA, 80 bp, synthetic construct; identical to SEQ ID NO: 20347
  source 1..80: mol_type = other DNA

SEQ ID NO: 105366 - DNA, 80 bp, synthetic construct
  source 1..80: mol_type = other DNA
gtctggcctaagttttccttatatagggatcttgtctatgtaaggactaaactaagctgtgcctacatgcgggggaccag

SEQ ID NO: 105367 - DNA, 80 bp, synthetic construct
  source 1..80: mol_type = other DNA
ggtattaccaagctgcttccttagctgtaaacatgttagaaccgtgggttgtcactggcaaggaatgtgccttgctagtt

SEQ ID NO: 105368 - DNA, 80 bp, synthetic construct
  source 1..80: mol_type = other DNA
acagtcgtgcgccaacacacccggctaatttttttctatttttagtagagatggggtttcaccgtgttggccaggctggt

SEQ ID NO: 105369 - DNA, 80 bp, synthetic construct; identical to SEQ ID NO: 20348
  source 1..80: mol_type = other DNA

SEQ ID NO: 105370 - DNA, 80 bp, synthetic construct
  source 1..80: mol_type = other DNA
ttacaggcgcccgccaccacatctggctaatttgtatttttagtagagacgaggtttctccatgttggtcaggctggtct

SEQ ID NO: 105371 - DNA, 80 bp, synthetic construct
  source 1..80: mol_type = other DNA
ctggttttattttagtgctgttcctttgggaaccacggccaaagaagagatggagcggttctggaataagaatataggtt

SEQ ID NO: 105372 - DNA, 80 bp, synthetic construct; identical to SEQ ID NO: 20349
  source 1..80: mol_type = other DNA

SEQ ID NO: 105373 - DNA, 80 bp, synthetic construct
  source 1..80: mol_type = other DNA
gaaataacatacagagttcccatatacctttatatggaaggtatatagtatatatgctaagttatatagaagttgcaact

SEQ ID NO: 105374 - DNA, 80 bp, synthetic construct
  source 1..80: mol_type = other DNA
cctcagcctcccgagtagctggggctacaggtgtgcaccactacggccagctaatttttgtatttttagtagagatggga

SEQ ID NO: 105375 - DNA, 80 bp, synthetic construct
  source 1..80: mol_type = other DNA
attcagacatgctaataagcagattcccagctgcttaacatgtctgaatgatacaagaagaagttgcaatgatgatgata

SEQ ID NO: 105376 - DNA, 80 bp, synthetic construct; identical to SEQ ID NO: 20350
  source 1..80: mol_type = other DNA

SEQ ID NO: 105377 - DNA, 80 bp, synthetic construct
  source 1..80: mol_type = other DNA
attgtcttaccattctttaggttagaagtacaacacaggtctcattaggctaaaattaagttgtttgcaggggctgcatt

SEQ ID NO: 105378 - DNA, 80 bp, synthetic construct
  source 1..80: mol_type = other DNA
tctgacttcttctacctcccttttctcctttcaagggacccttgtcattatatttagacctccccaaatatttcaggaca

SEQ ID NO: 105379 - DNA, 80 bp, synthetic construct
  source 1..80: mol_type = other DNA
ttatgtctgtcccatgacaaaatacattcaccacatcgcggtggccccaaaagtttcaacctactgtagcctcatctcaa

SEQ ID NO: 105380 - DNA, 80 bp, synthetic construct; identical to SEQ ID NO: 20351
  source 1..80: mol_type = other DNA

SEQ ID NO: 105381 - DNA, 80 bp, synthetic construct
  source 1..80: mol_type = other DNA
tcggggtatgacagtcttcttttcatcttctctctgtcacttttagtctatgctggcagtatttctgttggtataacatt

SEQ ID NO: 105382 - DNA, 80 bp, synthetic construct
  source 1..80: mol_type = other DNA
gtggtggtgcgcctgtagtcccagctacttgggaggctgaggcacaagaatctcttgaacctgggtggtggaggttgcag

SEQ ID NO: 105383 - DNA, 80 bp, synthetic construct
  source 1..80: mol_type = other DNA
ctgcctctgtttctgccttctgatgagatggttgaggggatctactagtaacatgcttaatttcaaaacgccttttatgt

SEQ ID NO: 105384 - DNA, 80 bp, synthetic construct
  source 1..80: mol_type = other DNA
cattgcaacctccgcctcccaggcttaagcaatccttccacctcagcctcctgagtagctgggactacagtgcatgtcac

SEQ ID NO: 105385 - DNA, 80 bp, synthetic construct; identical to SEQ ID NO: 20352
  source 1..80: mol_type = other DNA

SEQ ID NO: 105386 - DNA, 80 bp, synthetic construct
  source 1..80: mol_type = other DNA
gagacggggtttcgctatgttggctagactggtcttgagctcctgacctcgtgatctgcccgccctggcctcccaaagtg

SEQ ID NO: 105387 - DNA, 80 bp, synthetic construct
  source 1..80: mol_type = other DNA
ctggagtgtagtagtggtgtgatcatagctcgttgtaaccttgaactcctggactcaagtgatcttcctgactcagcctc

SEQ ID NO: 105388 - DNA, 80 bp, synthetic construct; identical to SEQ ID NO: 20353
  source 1..80: mol_type = other DNA

SEQ ID NO: 105389 - DNA, 80 bp, synthetic construct
  source 1..80: mol_type = other DNA
attcatattttcctttttgaaatacaatttgtataccatacggttcacacattgaaagcatacagtttagtggcttttgt

SEQ ID NO: 105390 - DNA, 80 bp, synthetic construct
  source 1..80: mol_type = other DNA
cctgcctcagcctcccaagtagctgggattacagatgtgcatcaccatgcctgactaatttttgtgtttttagtagagac

SEQ ID NO: 105391 - DNA, 80 bp, synthetic construct
  source 1..80: mol_type = other DNA
gccatcaccaccaatcgtttgtccctcccagctctagacaatcagttatttactttccatcttataaacttacctattcc

SEQ ID NO: 105392 - DNA, 80 bp, synthetic construct; identical to SEQ ID NO: 20354
  source 1..80: mol_type = other DNA

SEQ ID NO: 105393 - DNA, 80 bp, synthetic construct
  source 1..80: mol_type = other DNA
gtggcgcagtctcagctcattgcaaccttcacctcccaggttcaagcgatattcctgcctcagcccccaagtagctggga

SEQ ID NO: 105394 - DNA, 80 bp, synthetic construct
  source 1..80: mol_type = other DNA
ctatgtttaacattttgaggaactaccagactgttttccaaagtgactgtaccattttacattcacactagcagtgtata

SEQ ID NO: 105395 - DNA, 80 bp, synthetic construct
  source 1..80: mol_type = other DNA
gttacagctgcactcctcttctagttaccacaatctatactaattttctatttgctgccataacaaattactgcaaacgt

SEQ ID NO: 105396 - DNA, 80 bp, synthetic construct; identical to SEQ ID NO: 20355
  source 1..80: mol_type = other DNA

SEQ ID NO: 105397 - DNA, 80 bp, synthetic construct
  source 1..80: mol_type = other DNA
cacaagttttctacaagtttttaataaaacttgtggggcatgatcatggcttactgcagccttgacttcccaggcttaag

SEQ ID NO: 105398 - DNA, 80 bp, synthetic construct
  source 1..80: mol_type = other DNA
agttctgggattacggctcactccctctttatcttaaggttgtcttattagcaaccttaatttcatctgcaaccttaatt

SEQ ID NO: 105399 - DNA, 80 bp, synthetic construct
  source 1..80: mol_type = other DNA
ttgcaagacagtctccaaagtacaaccatcacaatgttactatctaaaccgtaggtcccattcaaattttgccacttgtc

SEQ ID NO: 105400 - DNA, 80 bp, synthetic construct; identical to SEQ ID NO: 20356
  source 1..80: mol_type = other DNA

SEQ ID NO: 105401 - DNA, 80 bp, synthetic construct
  source 1..80: mol_type = other DNA
catcagatatttactcaccagtatctgttggaggtacttgcctaaatcatttattactgtgatagttgccaaatgtaatg

SEQ ID NO: 105402 - DNA, 80 bp, synthetic construct
  source 1..80: mol_type = other DNA
gtctcagacctggccaataggagttcttcaaaatgactcctgtgaaatcagtatctgggtgctagatgtgctcattgcta

SEQ ID NO: 105403 - DNA, 80 bp, synthetic construct
  source 1..80: mol_type = other DNA
agtggcattgataacagtttttgctgatgtctttgaagataagtccctgtaaatctgctttttgtttttttaggctaacc

SEQ ID NO: 105404 - DNA, 80 bp, synthetic construct; identical to SEQ ID NO: 20357
  source 1..80: mol_type = other DNA

SEQ ID NO: 105405 - DNA, 80 bp, synthetic construct
  source 1..80: mol_type = other DNA
aaaaattagctggccgtggtggcacgtgcttgtagtcccagctactcaggagtctgaggcaggagaatcgcttgaacccg

SEQ ID NO: 105406 - DNA, 80 bp, synthetic construct
  source 1..80: mol_type = other DNA
tggccttttttcacaggtcatataaagaatggttgtaggttggtgaggtgagtctttcactaccttatttgcttttctgg

SEQ ID NO: 105407 - DNA, 80 bp, synthetic construct
  source 1..80: mol_type = other DNA
gatatctgagatacctgaagtcatattttctattacccattttttgggttttttgaaagaggcctggaagtaaatggtta

SEQ ID NO: 105408 - DNA, 80 bp, synthetic construct
  source 1..80: mol_type = other DNA
cttgctgcaacctcgacctcccgggctcaggcaatcctccttcctcagtcccccaagtagctgagactatagacacacgc

SEQ ID NO: 105409 - DNA, 80 bp, synthetic construct; identical to SEQ ID NO: 20358
  source 1..80: mol_type = other DNA

SEQ ID NO: 105410 - DNA, 80 bp, synthetic construct
  source 1..80: mol_type = other DNA
aattaatctgaagatccagtcactcacatgtcttggagttgattctggctcttggatggggcccttattttctcaccaca

SEQ ID NO: 105411 - DNA, 80 bp, synthetic construct
  source 1..80: mol_type = other DNA
tcatcaagtcctgcccaggttcaagggtagaggctaaatacttgcttgatgagaaatgacaagattctggaagatcctgg

SEQ ID NO: 105412 - DNA, 80 bp, synthetic construct
  source 1..80: mol_type = other DNA
tctgaaagatttctggaacagtgcatatgtttcttctattagctctttcagtcatgggatttgattcatctggtcccaga

SEQ ID NO: 105413 - DNA, 80 bp, synthetic construct; identical to SEQ ID NO: 20359
  source 1..80: mol_type = other DNA

SEQ ID NO: 105414 - DNA, 80 bp, synthetic construct
  source 1..80: mol_type = other DNA
gagttgatcagagtggtatgtggctcttcttccaccttttatatttctcttgttaaatctgagttgatcagagtggtatc

SEQ ID NO: 105415 - DNA, 80 bp, synthetic construct
  source 1..80: mol_type = other DNA
gtctaagctaacattccaagatgagcgttagctttcttcagagactcttgttctttccattttacccaccagttctctct

SEQ ID NO: 105416 - DNA, 80 bp, synthetic construct
  source 1..80: mol_type = other DNA
ggataggtaacttattaggaaataagtggtatgttcagtttggatattttggggcatataataagggaggattcaaggat

SEQ ID NO: 105417 - DNA, 80 bp, synthetic construct; identical to SEQ ID NO: 20360
  source 1..80: mol_type = other DNA

SEQ ID NO: 105418 - DNA, 80 bp, synthetic construct
  source 1..80: mol_type = other DNA
tgtatttttagtagagatggggtttcaccgtgttggccagcctggtctcgaacacctgacctcatgatccacccgcctca

SEQ ID NO: 105419 - DNA, 80 bp, synthetic construct
  source 1..80: mol_type = other DNA
cagtctggagttcctggcctcaagcgaccctctcacttcagtctcccaagtagctgggaccacaggcctctgccaccaca

SEQ ID NO: 105420 - DNA, 80 bp, synthetic construct; identical to SEQ ID NO: 20361
  source 1..80: mol_type = other DNA

SEQ ID NO: 105421 - DNA, 80 bp, synthetic construct
  source 1..80: mol_type = other DNA
tgcgatcttggctcaccgcaacctccacctcctgggttcaagcaattttcctgcctcagcctcccgagtaactgagatta

SEQ ID NO: 105422 - DNA, 80 bp, synthetic construct
  source 1..80: mol_type = other DNA
aggtttgtatttttaaagtaaaaagtggaaacacggctgggcacagtggctcacacctgtaattccagtactttgggagg

SEQ ID NO: 105423 - DNA, 80 bp, synthetic construct
  source 1..80: mol_type = other DNA
agaggttggagtgagctgagactgtggcatgggactccagcctgggtgacagagcaagaccctgttccgggggggtaaaa

SEQ ID NO: 105424 - DNA, 80 bp, synthetic construct
  source 1..80: mol_type = other DNA
gactctgtctcaaaaaaaaaaaaagaaaaaaaagtgcctatttcagaattagtttatatttttgccaagatagactctct

SEQ ID NO: 105425 - DNA, 80 bp, synthetic construct; identical to SEQ ID NO: 20362
  source 1..80: mol_type = other DNA

SEQ ID NO: 105426 - DNA, 80 bp, synthetic construct
  source 1..80: mol_type = other DNA
tccagcgattctcctgcctcagcctcctgagtagctgggattacaggcatgtgccaccacgcctggctaaatttttgtat

SEQ ID NO: 105427 - DNA, 80 bp, synthetic construct
  source 1..80: mol_type = other DNA
cttcctgatatcatgtttattgaaattatagagagcagagaaatgtaatagagatgggctggctgactgatcattgatga

SEQ ID NO: 105428 - DNA, 80 bp, synthetic construct
  source 1..80: mol_type = other DNA
agctacagagtgaattatatactggtcttagataattagtacatcctttttaggtaggaaggtttattatatggagtgca

SEQ ID NO: 105429 - DNA, 80 bp, synthetic construct; identical to SEQ ID NO: 20363
  source 1..80: mol_type = other DNA

SEQ ID NO: 105430 - DNA, 80 bp, synthetic construct
  source 1..80: mol_type = other DNA
gggcttagactgcatctgtctgtatttttaattatctagtagggtacctagaatgcagtagataatttagtaaatatttg

SEQ ID NO: 105431 - DNA, 80 bp, synthetic construct
  source 1..80: mol_type = other DNA
ttcaactggcatttctgtgtgatgtgattactagtttagctgaaagctattcagttcagtgggagccagaagaggttatt

SEQ ID NO: 105432 - DNA, 80 bp, synthetic construct; identical to SEQ ID NO: 20364
  source 1..80: mol_type = other DNA

SEQ ID NO: 105433 - DNA, 80 bp, synthetic construct
  source 1..80: mol_type = other DNA
tcactgcaacctcatgagaccagcctcctgggttcaagctattcttctgcctcaacctctcaagtagctgggattacagg

SEQ ID NO: 105434 - DNA, 80 bp, synthetic construct
  source 1..80: mol_type = other DNA
agggaataagaggaaatatcttgcctagaatcggtatgaaattatatacctgagagacagaagccccactgttttacctt

SEQ ID NO: 105435 - DNA, 80 bp, synthetic construct
  source 1..80: mol_type = other DNA
gtgtaagtgtgctcttgctccagaaatttgatgccaaatagagctttcgaggtaggaaagggagtttctattgacttttg

SEQ ID NO: 105436 - DNA, 80 bp, synthetic construct; identical to SEQ ID NO: 20365
  source 1..80: mol_type = other DNA

SEQ ID NO: 105437 - DNA, 80 bp, synthetic construct
  source 1..80: mol_type = other DNA
gaatcaaggtataaggatgatttgtgttgttaggaatccatatgtagttcctggtttttaacctgcttgcactgaactgg

SEQ ID NO: 105438 - DNA, 80 bp, synthetic construct
  source 1..80: mol_type = other DNA
tcctaaaaatcactgaaagaacaagagcagtttatttattaggctgtagtttcccttattatctcagtatatttgtcacc

SEQ ID NO: 105439 - DNA, 80 bp, synthetic construct
  source 1..80: mol_type = other DNA
gcaggaggattgcttgagcccaggaattcgagaccatcctgggcaacatatcaagacccagcactttgggaggctgaggt

SEQ ID NO: 105440 - DNA, 80 bp, synthetic construct; identical to SEQ ID NO: 20366
  source 1..80: mol_type = other DNA

SEQ ID NO: 105441 - DNA, 80 bp, synthetic construct
  source 1..80: mol_type = other DNA
cccctttgaatggtggccttgcattcatcagcatatgtcctgtttttcctctctcctagttccatgatagaatatagtag

SEQ ID NO: 105442 - DNA, 80 bp, synthetic construct
  source 1..80: mol_type = other DNA
ggaataggtttttgccaggtggatgacttaagcaaattactcagttctctaaacctcagcttattccttataaaatgggc

SEQ ID NO: 105443 - DNA, 80 bp, synthetic construct
  source 1..80: mol_type = other DNA
tttgttctgaaatgaagtcagttccagcaactgtggtctttgcattcttgtggccctagtcccatccatttttcacacaa

SEQ ID NO: 105444 - DNA, 80 bp, synthetic construct; identical to SEQ ID NO: 20367
  source 1..80: mol_type = other DNA

SEQ ID NO: 105445 - DNA, 80 bp, synthetic construct
  source 1..80: mol_type = other DNA
gtactctattccttcatagttcttattgtgctgtgttgtttctttcaaagcttttattacacaagttgtaattattttat

SEQ ID NO: 105446 - DNA, 80 bp, synthetic construct
  source 1..80: mol_type = other DNA
taattttttgtatttttagtagagacagggtttcaccatgttagccaggatggtctcgatctcctgaccttgtgatccgc

SEQ ID NO: 105447 - DNA, 80 bp, synthetic construct
  source 1..80: mol_type = other DNA
agtggcgcgatctcagctcactgcagcctctgcctccaaggttcaagcaattcttctgcctcagcctcccgggtagctgg

SEQ ID NO: 105448 - DNA, 80 bp, synthetic construct; identical to SEQ ID NO: 20368
  source 1..80: mol_type = other DNA

SEQ ID NO: 105449 - DNA, 80 bp, synthetic construct
  source 1..80: mol_type = other DNA
ctgttacacattagaaattagatagggataatatatagtctctactctcaaggatagaggaatctaaggagtaagacaaa

SEQ ID NO: 105450 - DNA, 80 bp, synthetic construct
  source 1..80: mol_type = other DNA
tgattctcctgcctcagcctcccgactagctgggattacaggcatgcaccaccacgcctggctaattttgtatttttagt

SEQ ID NO: 105451 - DNA, 80 bp, synthetic construct
  source 1..80: mol_type = other DNA
ccaacaaatacagttgtcccttattatctgttggagattggttccaggattcctcctcagataccaaaatctacagatac

SEQ ID NO: 105452 - DNA, 80 bp, synthetic construct
  source 1..80: mol_type = other DNA
ttttcagtacagataaaaccattcatttcccccacccaatattttcaatccacagttagttgtatatccacagatgcaga

SEQ ID NO: 105453 - DNA, 80 bp, synthetic construct; identical to SEQ ID NO: 20369
  source 1..80: mol_type = other DNA

SEQ ID NO: 105454 - DNA, 80 bp, synthetic construct
  source 1..80: mol_type = other DNA
ttttttttgtatttttagtagagttggggtttcaacatcttggccaggctggtcttgaactcctgacctcgtgatccacc

SEQ ID NO: 105455 - DNA, 80 bp, synthetic construct
  source 1..80: mol_type = other DNA
atcaagaccatcctggccaacatggtgaaaccccatctctactaaaaatacaaaaattagctgggcatggtggcatgtgc

SEQ ID NO: 105456 - DNA, 80 bp, synthetic construct; identical to SEQ ID NO: 20370
  source 1..80: mol_type = other DNA

SEQ ID NO: 105457 - DNA, 80 bp, synthetic construct
  source 1..80: mol_type = other DNA
aaacttgacaatttttgtttgtttgtttttttttgagatggagtcttgccctgtcgcccaggctggagtgcaatggtgcc

SEQ ID NO: 105458 - DNA, 80 bp, synthetic construct
  source 1..80: mol_type = other DNA
actccttacctcaagtgatccgcctgcctctgcctcccaaagtactgggattacaggcatgagctactgcgcctggcctg

SEQ ID NO: 105459 - DNA, 80 bp, synthetic construct
  source 1..80: mol_type = other DNA
gaccagcctggccaacatagtgaaaccccatctctactaaaaatccaaaaaaaaaaaaaaaaaaaaattagccagttgtg

SEQ ID NO: 105460 - DNA, 80 bp, synthetic construct
  source 1..80: mol_type = other DNA
caggatttttcatagtgacagaaaaagtctatttgactttttcctataaaagtctagttgaatttaggtacatgccttga

SEQ ID NO: 105461 - DNA, 80 bp, synthetic construct; identical to SEQ ID NO: 20371
  source 1..80: mol_type = other DNA

SEQ ID NO: 105462 - DNA, 80 bp, synthetic construct
  source 1..80: mol_type = other DNA
tgtaacgtgggctacttgggagactgaagcacgagaatcgcttgaacccaggaggcagaggttgcagtgagccgagatca

SEQ ID NO: 105463 - DNA, 80 bp, synthetic construct
  source 1..80: mol_type = other DNA
ctattctctagaaaagccaaaagatttacagattcataaagtaactgatgggctttgaaaatgactgtgtttttcttctg

SEQ ID NO: 105464 - DNA, 80 bp, synthetic construct; identical to SEQ ID NO: 20372
  source 1..80: mol_type = other DNA

SEQ ID NO: 105465 - DNA, 80 bp, synthetic construct
  source 1..80: mol_type = other DNA
tcaccatgcctggttaattttgtatttttagtagagacggggtttcaccatgttggccaggctagtcttgaactcctgac

SEQ ID NO: 105466 - DNA, 80 bp, synthetic construct
  source 1..80: mol_type = other DNA
atgctcagcctggataatacctttttgctgtgtatgggggcaacagttagaatttagagaccttaaaactagtataaatt

SEQ ID NO: 105467 - DNA, 80 bp, synthetic construct
  source 1..80: mol_type = other DNA
ggtattttttaaaaaaaatcaaagatagcccaaatgtgttagagacataagaccggaatgtgattgaaattaagtaaggc

SEQ ID NO: 105468 - DNA, 80 bp, synthetic construct
  source 1..80: mol_type = other DNA
agtgcatttaggtggaacatacatacttcccctttccaacagttttctatgagcaccactagtctatatggccttaattg

SEQ ID NO: 105469 - DNA, 80 bp, synthetic construct; identical to SEQ ID NO: 20373
  source 1..80: mol_type = other DNA

SEQ ID NO: 105470 - DNA, 80 bp, synthetic construct
  source 1..80: mol_type = other DNA
tcttctatactttagtctcttgtaattttgacaagcctgaaggtaggctttgggctgtagaaaatgcaccaagagttctt

SEQ ID NO: 105471 - DNA, 80 bp, synthetic construct
  source 1..80: mol_type = other DNA
aataatcagaatagttaatcttatacctctcagaaaatgtgtgatatttgtagttaaacaagtccttctcagcccttcct

SEQ ID NO: 105472 - DNA, 80 bp, synthetic construct; identical to SEQ ID NO: 20374
  source 1..80: mol_type = other DNA

SEQ ID NO: 105473 - DNA, 80 bp, synthetic construct
  source 1..80: mol_type = other DNA
gaagaagtgtctgaaagagcttatgatgacttctggaagtgacaataggacttgctgacagtccgcacagttacatatat

SEQ ID NO: 105474 - DNA, 80 bp, synthetic construct
  source 1..80: mol_type = other DNA
aggagtggggtcagtttcctgatgcccaatatactgaacatcagaggagaattcagaaaatctcatatttaattctcata

SEQ ID NO: 105475 - DNA, 80 bp, synthetic construct
  source 1..80: mol_type = other DNA
aatgatcccagatctccttgacctcccagagatttgtataaaaaaaaatttttcctgattacaagaacatattaccaaga

SEQ ID NO: 105476 - DNA, 80 bp, synthetic construct; identical to SEQ ID NO: 20375
  source 1..80: mol_type = other DNA

SEQ ID NO: 105477 - DNA, 80 bp, synthetic construct
  source 1..80: mol_type = other DNA
tgggaggcggaggttgcagtcagctgagatcgtgccaccgcactccagtctgggcgacagagcgagactccgtctcaaag

SEQ ID NO: 105478 - DNA, 80 bp, synthetic construct
  source 1..80: mol_type = other DNA
gttattcacatcctagtatttccaagagttttgactctcgtaggtcatttgagagtaggtggtgttatcctaggataaca

SEQ ID NO: 105479 - DNA, 80 bp, synthetic construct
  source 1..80: mol_type = other DNA
ctggcactgaaattcaaaagatagttttgaatttcctatcaaaactaccaaaagaggggttcctgcagtcttctataata

SEQ ID NO: 105480 - DNA, 80 bp, synthetic construct; identical to SEQ ID NO: 20376
  source 1..80: mol_type = other DNA

SEQ ID NO: 105481 - DNA, 80 bp, synthetic construct
  source 1..80: mol_type = other DNA
aaaaacaaaagcaaaaacaaaatcatccacataaatggaaagaaaaaaatatttttatttcattcttaaataatcatact

SEQ ID NO: 105482 - DNA, 80 bp, synthetic construct
  source 1..80: mol_type = other DNA
ggctggtcttgaattcctgggcccgagtaatcctcccacctcagcctcctaaattgctaggattacaggcatgagccacc

SEQ ID NO: 105483 - DNA, 80 bp, synthetic construct
  source 1..80: mol_type = other DNA
gcaaagatgtgatcattgaaagaaatctaacatctaatgttgaaactgaactaccttgagctagtagtggttcacatgat

SEQ ID NO: 105484 - DNA, 80 bp, synthetic construct; identical to SEQ ID NO: 20377
  source 1..80: mol_type = other DNA

SEQ ID NO: 105485 - DNA, 80 bp, synthetic construct
  source 1..80: mol_type = other DNA
cttcctgcaacctccacctcccaggttcaagagtttctcctgcctcagcctcctgagtagctgggactacaggtgtgcgc

SEQ ID NO: 105486 - DNA, 80 bp, synthetic construct
  source 1..80: mol_type = other DNA
tatttctaatttgagtttcatatttgttatacttgatttctcagtcattggtggtcgatagccactgagctccaacagat

SEQ ID NO: 105487 - DNA, 80 bp, synthetic construct
  source 1..80: mol_type = other DNA
taatggctaatgatgttaagcacctgttcatgcactgattggccatttatttatcgtccttggaaagatgtctattcaga

SEQ ID NO: 105488 - DNA, 80 bp, synthetic construct; identical to SEQ ID NO: 20378
  source 1..80: mol_type = other DNA

SEQ ID NO: 105489 - DNA, 80 bp, synthetic construct
  source 1..80: mol_type = other DNA
gggccaggcgcagtggctcatgctggtaatcccagcgctttgggaggctgaggtgggcgaatcacttgaggccaggagtt

SEQ ID NO: 105490 - DNA, 80 bp, synthetic construct
  source 1..80: mol_type = other DNA
gcttactgcactctagcctgggcaacagagcgagactctgtctcaaaaaaaaaaaaaaaaaaaagagaacctaatttttt

SEQ ID NO: 105491 - DNA, 80 bp, synthetic construct
  source 1..80: mol_type = other DNA
tagtttatgatgagatcccaagtagtctgtctcccatcataaacttgaacatgagtttaaatcttctccttttcaaggcc

SEQ ID NO: 105492 - DNA, 80 bp, synthetic construct
  source 1..80: mol_type = other DNA
atacaaaaattagctgggcgttgtggtgggcacctgtcatccccactactcaggaggctgaagcaggagactcgcttgaa

SEQ ID NO: 105493 - DNA, 80 bp, synthetic construct; identical to SEQ ID NO: 20379
  source 1..80: mol_type = other DNA

SEQ ID NO: 105494 - DNA, 80 bp, synthetic construct
  source 1..80: mol_type = other DNA
cacattttctctgtgaagggagtggggagactgggaggattctttccttcattactgggtttagtgctgttctttttttt

SEQ ID NO: 105495 - DNA, 80 bp, synthetic construct
  source 1..80: mol_type = other DNA
gttggcgttatagacgcatgccaccactcctggtttttgtatttttagtagagatggggtttcaccatgttggccaggct

SEQ ID NO: 105496 - DNA, 80 bp, synthetic construct; identical to SEQ ID NO: 20380
  source 1..80: mol_type = other DNA

SEQ ID NO: 105497 - DNA, 80 bp, synthetic construct
  source 1..80: mol_type = other DNA
aggcgcctcccaccacgcccggctaattttttgtatttttagtagagatggggtttccccatgttagccaggctggtctc

SEQ ID NO: 105498 - DNA, 80 bp, synthetic construct
  source 1..80: mol_type = other DNA
tacctatttatgtgtcaggtactgttgtagacactggggattcagttatgagctagataaccattgttgctgctttcatt

SEQ ID NO: 105499 - DNA, 80 bp, synthetic construct
  source 1..80: mol_type = other DNA
atttctgttttgagatgttggacagaattgggccaactttaatagaaactgggtgccaagaattccaggtttcaatattg

SEQ ID NO: 105500 - DNA, 80 bp, synthetic construct
  source 1..80: mol_type = other DNA
tgcccacaaccacggccagctaatttttttttttttttggtatttttagtagagacgggattttgccatgttggccagcc

SEQ ID NO: 105501 - DNA, 80 bp, synthetic construct; identical to SEQ ID NO: 20381
  source 1..80: mol_type = other DNA

SEQ ID NO: 105502 - DNA, 80 bp, synthetic construct
  source 1..80: mol_type = other DNA
tcacgcctgtaatctcagcattttgggaggccgaggcgggcggataatctgaggccgggagttcgagaccagccttacca

SEQ ID NO: 105503 - DNA, 80 bp, synthetic construct
  source 1..80: mol_type = other DNA
gcctgggcaacaagagcgaaattccgtctcaaaaaaaaaaaaaaaaatacaaaaattagctgggggtggtggcatgtgcc

SEQ ID NO: 105504 - DNA, 80 bp, synthetic construct
  source 1..80: mol_type = other DNA
gttttgcttccaagaaggcaattaaaattcagttctttctgtattttcattacttctgaatctgagtcaactgtcagatg

SEQ ID NO: 105505 - DNA, 80 bp, synthetic construct; identical to SEQ ID NO: 20382
  source 1..80: mol_type = other DNA

SEQ ID NO: 105506 - DNA, 80 bp, synthetic construct
  source 1..80: mol_type = other DNA
atcagctgatcagcttcctctgttcatattttggctcagacagagacttgccctatatttgtctttgtctcaatatgggg

SEQ ID NO: 105507 - DNA, 80 bp, synthetic construct
  source 1..80: mol_type = other DNA
acaggattttgtgttttctgtgacagtctgcagtttttggcctctgaacttgatagttgacttgccagaagatctaatgg

SEQ ID NO: 105508 - DNA, 80 bp, synthetic construct
  source 1..80: mol_type = other DNA
agttagaagcaatttgagggttgaggtggaggcatcttctcatcttgatttttttttttttttctgggcttccatctttt

SEQ ID NO: 105509 - DNA, 80 bp, synthetic construct; identical to SEQ ID NO: 20383
  source 1..80: mol_type = other DNA

SEQ ID NO: 105510 - DNA, 80 bp, synthetic construct
  source 1..80: mol_type = other DNA
caggaggattgcttgaacctgggaggtcaaggcctcagtgagctgagattgtgccactgcactccagcctaggtgacaaa

SEQ ID NO: 105511 - DNA, 80 bp, synthetic construct
  source 1..80: mol_type = other DNA
aacaagagtctatctctattttttagtattaaaaagaaaagtgggttttaactcaattggtagaaaaccaatttagtggc

SEQ ID NO: 105512 - DNA, 80 bp, synthetic construct
  source 1..80: mol_type = other DNA
catctctactaaaaatacaaaaattagcttggcatggtggcatgcgcctgtagtcccagccactggcagggctgaggcaa

SEQ ID NO: 105513 - DNA, 80 bp, synthetic construct; identical to SEQ ID NO: 20384
  source 1..80: mol_type = other DNA

SEQ ID NO: 105514 - DNA, 80 bp, synthetic construct
  source 1..80: mol_type = other DNA
tatcctttagaatactagtcctctgataaatagagtttccctctataaaaagattctgagattgactgtatctaggaaat

SEQ ID NO: 105515 - DNA, 80 bp, synthetic construct
  source 1..80: mol_type = other DNA
aaccccatctctactaaaaatacaaaaacaaaattagccaggcgtggtggcgtgtgcctctagtcccagctacttgggag

SEQ ID NO: 105516 - DNA, 80 bp, synthetic construct
  source 1..80: mol_type = other DNA
tttgtatgaccacagaacttttttttttttggcccatacaatggctttcaacattctgagagcaagtgtttggaagaata

SEQ ID NO: 105517 - DNA, 80 bp, synthetic construct; identical to SEQ ID NO: 20385
  source 1..80: mol_type = other DNA

SEQ ID NO: 105518 - DNA, 80 bp, synthetic construct
  source 1..80: mol_type = other DNA
cttttttttttttttgctttgtccacagatgtgggacctaggaaaaggcctgaagattccccagctataccagtctggag

SEQ ID NO: 105519 - DNA, 80 bp, synthetic construct
  source 1..80: mol_type = other DNA
cttatctccagcctgggaaaagttctccttatttgtttagatccttttgtattttcagatctccttggagcagtagagta

SEQ ID NO: 105520 - DNA, 80 bp, synthetic construct
  source 1..80: mol_type = other DNA
gcttttggctccttcttcctgagacagtggaaacaatgccagctctgtggcttctgccctggggatgggccgggttgggg

SEQ ID NO: 105521 - DNA, 80 bp, synthetic construct
  source 1..80: mol_type = other DNA
ataaagagggctagttagttcttggagcagctgcttttgaggagaaaatatatagctttggacacgaggaagatctagaa

SEQ ID NO: 105522 - DNA, 80 bp, synthetic construct; identical to SEQ ID NO: 20386
  source 1..80: mol_type = other DNA

SEQ ID NO: 105523 - DNA, 80 bp, synthetic construct
  source 1..80: mol_type = other DNA
cctgttttctttcgtcgtcgtgggtgggaattgtcgcctaagtggttccgggttggtggatgaccttgagccctcaggaa

SEQ ID NO: 105524 - DNA, 80 bp, synthetic construct; identical to SEQ ID NO: 20387
  source 1..80: mol_type = other DNA

SEQ ID NO: 105525 - DNA, 80 bp, synthetic construct
  source 1..80: mol_type = other DNA
cccatttcttctggagttggtgtgtttggatgtgggagtggaggggggatcagttcgaaaatcatttaacctgggcattt

SEQ ID NO: 105526 - DNA, 80 bp, synthetic construct
  source 1..80: mol_type = other DNA
tctcaagaactgttaaagagatacgccaataggatttggcgattgaatttaggggaaaagtctctcatgatttccagatt

SEQ ID NO: 105527 - DNA, 80 bp, synthetic construct
  source 1..80: mol_type = other DNA
tggtcatttagaaagtttgtcagtcctgttaaaggagaggttcttatgatcatcctaatgactctttcctcagctctgtt

SEQ ID NO: 105528 - DNA, 80 bp, synthetic construct; identical to SEQ ID NO: 20388
  source 1..80: mol_type = other DNA

SEQ ID NO: 105529 - DNA, 80 bp, synthetic construct
  source 1..80: mol_type = other DNA
atctcggctcactgcaacctccaccttctgagttcaagcaattctcctgcccctgcctcccgactagctgggattacagg

SEQ ID NO: 105530 - DNA, 80 bp, synthetic construct
  source 1..80: mol_type = other DNA
ccacgcctggaccactaacttacattcataaggtgtctgttcacttcactgaaccaagactggcttaattctgtagcaat

SEQ ID NO: 105531 - DNA, 80 bp, synthetic construct
  source 1..80: mol_type = other DNA
tgtactcagagttatatcctatatgtacactgcctgtcagtttgggttactgtgtggcatatgttgaacatgaaagatgt

SEQ ID NO: 105532 - DNA, 80 bp, synthetic construct
  source 1..80: mol_type = other DNA
ctgcagccctcactcttcatggtcactggcaagtatagcaattccaaatatagttgtctgctcagtttgtttgctgtgag

SEQ ID NO: 105533 - DNA, 80 bp, synthetic construct; identical to SEQ ID NO: 20389
  source 1..80: mol_type = other DNA

SEQ ID NO: 105534 - DNA, 80 bp, synthetic construct
  source 1..80: mol_type = other DNA
ccttctcaaaaccctattttgtctcttcatgttactcaaagtcagaattcttagggttgtctgtagactctacatgattg

SEQ ID NO: 105535 - DNA, 80 bp, synthetic construct
  source 1..80: mol_type = other DNA
tcatctccttcaggtcttgaatgccattctctcaacaaagccttccctaaccacttattcaaaattgcagtttctgtcct

SEQ ID NO: 105536 - DNA, 80 bp, synthetic construct
  source 1..80: mol_type = other DNA
ccttccctaaccacttattcaaaattgcagtttctgtcctgccattccttatctctcttgcttgttttatttttctcaat

SEQ ID NO: 105537 - DNA, 80 bp, synthetic construct; identical to SEQ ID NO: 20390
  source 1..80: mol_type = other DNA

SEQ ID NO: 105538 - DNA, 80 bp, synthetic construct
  source 1..80: mol_type = other DNA
tcagcctcccaagtagctgggattacaggcgtgcaccaccacatccggctaatttttttgtatttttagtagagacgggg

SEQ ID NO: 105539 - DNA, 80 bp, synthetic construct
  source 1..80: mol_type = other DNA
ccttctaaaatgagggtaaatgacaggttgggttccttgagttgttctttttaagttttgcaagggacaatatgttgtca

SEQ ID NO: 105540 - DNA, 80 bp, synthetic construct
  source 1..80: mol_type = other DNA
gttgttctttttaagttttgcaagggacaatatgttgtcattgtggggggtagggagccactttcggattgttgaaactg

SEQ ID NO: 105541 - DNA, 80 bp, synthetic construct
  source 1..80: mol_type = other DNA
ggagtgcagtggtgtgatcttggttcactgcaacctctgcctcctgggttcaagcaattctcatgcctcagcctcccaag

SEQ ID NO: 105542 - DNA, 80 bp, synthetic construct; identical to SEQ ID NO: 20391
  source 1..80: mol_type = other DNA

SEQ ID NO: 105543 - DNA, 80 bp, synthetic construct
  source 1..80: mol_type = other DNA
attaattggggtcttatcccaactatataacttaggttattcttaccaagggcactgaaggccttcatctttccaaatcc

SEQ ID NO: 105544 - DNA, 80 bp, synthetic construct
  source 1..80: mol_type = other DNA
ccagggctgagtcatggccttcttaatttctccatctgtacccttttttaggtgagctcagatctgacctgtttttctga

SEQ ID NO: 105545 - DNA, 80 bp, synthetic construct
  source 1..80: mol_type = other DNA
ttaaaacccccttctcaaagctatgctcaaactaaaattcttaggagtcattctagatatttctttttgttcttacccca

SEQ ID NO: 105546 - DNA, 80 bp, synthetic construct; identical to SEQ ID NO: 20392
  source 1..80: mol_type = other DNA

SEQ ID NO: 105547 - DNA, 80 bp, synthetic construct
  source 1..80: mol_type = other DNA
ttaaaccctagatgacgggttgataggtgcagcaaaccaccatggcacatgtatacctgtgtaacaaacctgcacgttca

SEQ ID NO: 105548 - DNA, 80 bp, synthetic construct
  source 1..80: mol_type = other DNA
ttcctcttcagttgttgctctgtcccccacccactctgttcattcatcacactacagccatagtgacctttttaaaacgt

SEQ ID NO: 105549 - DNA, 80 bp, synthetic construct; identical to SEQ ID NO: 20393
  source 1..80: mol_type = other DNA

SEQ ID NO: 105550 - DNA, 80 bp, synthetic construct
  source 1..80: mol_type = other DNA
aatgatgtattgataaatgctatgacatggatgaacattgaaaacattatgctaagttgacacaaaggccatatattgta

SEQ ID NO: 105551 - DNA, 80 bp, synthetic construct
  source 1..80: mol_type = other DNA
agcctcccaagtagctggcattacaggcatgtgccaccacgcctggctaattttgtattttttgtagagatggggtttct

SEQ ID NO: 105552 - DNA, 80 bp, synthetic construct
  source 1..80: mol_type = other DNA
taaatttgtagttgggtagtgggctaagaggtagagggtttctttttggggtaatgagaatgttctggaattaaatgatg

SEQ ID NO: 105553 - DNA, 80 bp, synthetic construct; identical to SEQ ID NO: 20394
  source 1..80: mol_type = other DNA

SEQ ID NO: 105554 - DNA, 80 bp, synthetic construct
  source 1..80: mol_type = other DNA
gggtagggatgctgtctcacttactatactcccaacatttatgacagattctggcacatgatatctacttaataaattct

SEQ ID NO: 105555 - DNA, 80 bp, synthetic construct
  source 1..80: mol_type = other DNA
agtcccaacactttgggaggctgaggtgggcggatcacaaggtcaggagttcgagaccagcctggccaatatggtgaaac

SEQ ID NO: 105556 - DNA, 80 bp, synthetic construct
  source 1..80: mol_type = other DNA
cgagactctgtctcaataaataaataaataaataaataaatagaaggaaataaaaaacaattagccgggcatggaggcat

SEQ ID NO: 105557 - DNA, 80 bp, synthetic construct; identical to SEQ ID NO: 20395
  source 1..80: mol_type = other DNA

SEQ ID NO: 105558 - DNA, 80 bp, synthetic construct
  source 1..80: mol_type = other DNA
aggcagggcttttggcactttcagctttaacctttgctgggctttgctatttcaactatcacgatgtgggcatctgcaaa

SEQ ID NO: 105559 - DNA, 80 bp, synthetic construct
  source 1..80: mol_type = other DNA
taagtccattggtggacagccttcttctcttaatcacaagattattttcagaatttaatctttgaggaaaaggtttgaga

SEQ ID NO: 105560 - DNA, 80 bp, synthetic construct
  source 1..80: mol_type = other DNA
tagtatatgatcaaacttccatatttgccttgggaataatggacaaagggaaatactcttaattcatgaataaaaacttt

SEQ ID NO: 105561 - DNA, 80 bp, synthetic construct; identical to SEQ ID NO: 20396
  source 1..80: mol_type = other DNA

SEQ ID NO: 105562 - DNA, 80 bp, synthetic construct
  source 1..80: mol_type = other DNA
ctatgcttttatatattagctatcagtagttttattcattagaattaggtgtccattgcatccacagcatgaaaacaaaa

SEQ ID NO: 105563 - DNA, 80 bp, synthetic construct
  source 1..80: mol_type = other DNA
gccccccgagtaactgggattacaggcacccaccaccacgcccagctaatattttgtattttcagtggacatggggtttc

SEQ ID NO: 105564 - DNA, 80 bp, synthetic construct
  source 1..80: mol_type = other DNA
ttcttctggggcttagcagttaggtaaatcagacacaaagtactggaaaacaaaaaggacttgtaataggcagaaaaata

SEQ ID NO: 105565 - DNA, 80 bp, synthetic construct; identical to SEQ ID NO: 20397
  source 1..80: mol_type = other DNA

SEQ ID NO: 105566 - DNA, 80 bp, synthetic construct
  source 1..80: mol_type = other DNA
aatagcagtggcacaccaacagatagtggtggtgggaccagtccaccctggtgggagagaatatataaacaatattctga

SEQ ID NO: 105567 - DNA, 80 bp, synthetic construct
  source 1..80: mol_type = other DNA
gatgaaatggagtcttccataaagtcaaaatggggatggcagtgactctggataatatgggaatccatagctatctctag

SEQ ID NO: 105568 - DNA, 80 bp, synthetic construct
  source 1..80: mol_type = other DNA
attaggatggagctgagctgtctttgggaagtcagtaggttgctgtgagctgctggaaaatgaggcaagattccggaagg

SEQ ID NO: 105569 - DNA, 80 bp, synthetic construct
  source 1..80: mol_type = other DNA
caataaaacaaaaaaaagattagccgggcatcactggcagtggcatgtgcctgtagttctagctacttgggaggccgagg

SEQ ID NO: 105570 - DNA, 80 bp, synthetic construct; identical to SEQ ID NO: 20398
  source 1..80: mol_type = other DNA

SEQ ID NO: 105571 - DNA, 80 bp, synthetic construct
  source 1..80: mol_type = other DNA
tttacctgcctttgaagggaattcatagtctaattggggcaacagaagaatgactgcaatacggtgtagtaagtgcagtg

SEQ ID NO: 105572 - DNA, 80 bp, synthetic construct
  source 1..80: mol_type = other DNA
cagatcaagcaaaagatgatatgtagtttggtatgacccagcacagggagggactgattgtagaggaccttatatgccac

SEQ ID NO: 105573 - DNA, 80 bp, synthetic construct
  source 1..80: mol_type = other DNA
acaggcacatgccaccatccctggctaatttttgtattttttgtagagatggggtcttgctctgttgcccaggctggtct

SEQ ID NO: 105574 - DNA, 80 bp, synthetic construct; identical to SEQ ID NO: 20399
  source 1..80: mol_type = other DNA

SEQ ID NO: 105575 - DNA, 80 bp, synthetic construct
  source 1..80: mol_type = other DNA
gtagtgtcattaaagaaaaatgttgaaggaaaattagatatggtactggaatcagtaactactgaagttttggatttgtg

SEQ ID NO: 105576 - DNA, 80 bp, synthetic construct
  source 1..80: mol_type = other DNA
ttgttgcccaggctggagtgcaatggcatgatctcggctcactgcaacctccgcttcctgggttcaagcggttctcctgc

SEQ ID NO: 105577 - DNA, 80 bp, synthetic construct; identical to SEQ ID NO: 20400
  source 1..80: mol_type = other DNA

SEQ ID NO: 105578 - DNA, 80 bp, synthetic construct
  source 1..80: mol_type = other DNA
tggtgcgatcttggctcactgcaagctccgcctgccaggttcacaccattctcccacctcagcctctggagtagctggga

SEQ ID NO: 105579 - DNA, 80 bp, synthetic construct
  source 1..80: mol_type = other DNA
ctagccattattatatttttttgagtcagaatcacgctctgttgtccaggttggagtgcagtggcgtgatcaaactcact

SEQ ID NO: 105580 - DNA, 80 bp, synthetic construct
  source 1..80: mol_type = other DNA
aagtaatccacctgcctttgcctcccaaagtgcttgcattatatgcttgcgccaccatgtctggccggattctagtttta

SEQ ID NO: 105581 - DNA, 80 bp, synthetic construct
  source 1..80: mol_type = other DNA
aggccgaggcgggtggatcatctgaggttgggagttcgagaccatcctgaccaacagagagaaaccctgtctctactaaa

SEQ ID NO: 105582 - DNA, 80 bp, synthetic construct; identical to SEQ ID NO: 20401
  source 1..80: mol_type = other DNA

SEQ ID NO: 105583 - DNA, 80 bp, synthetic construct
  source 1..80: mol_type = other DNA
aatcctcaccagagagagaagggttaccccaacacaagcttcaaaaatccccataaagttccagtgaacgtgaactgtca

SEQ ID NO: 105584 - DNA, 80 bp, synthetic construct
  source 1..80: mol_type = other DNA
taagtctaaatataagtcagctttctgctcagggatcagaaagcttttggagagagtggtatatacttgatgttatcgtc

SEQ ID NO: 105585 - DNA, 80 bp, synthetic construct; identical to SEQ ID NO: 20402
  source 1..80: mol_type = other DNA

SEQ ID NO: 105586 - DNA, 80 bp, synthetic construct
  source 1..80: mol_type = other DNA
gccgggtgtggtggcatgcgcctgtatagtcctagctacttgggagattgacgcgggagaattgcttgaacccaggaagt

SEQ ID NO: 105587 - DNA, 80 bp, synthetic construct
  source 1..80: mol_type = other DNA
gtttgagaccagcctggccaacatggtgaaaccccgtctctactaaaaatacaaatattagcctgccatggtggcttatg

SEQ ID NO: 105588 - DNA, 80 bp, synthetic construct
  source 1..80: mol_type = other DNA
taaaaaactagtctttcagttgtagattatgctggtgatgatgggagacacaatgtatctattggtattcttttgagaaa

SEQ ID NO: 105589 - DNA, 80 bp, synthetic construct; identical to SEQ ID NO: 20403
  source 1..80: mol_type = other DNA

SEQ ID NO: 105590 - DNA, 80 bp, synthetic construct
  source 1..80: mol_type = other DNA
gactgaggcaggagaattgcttgaacatgggaggtggaggttgcagtaagccgagatgtgccactgcactccagcctggg

SEQ ID NO: 105591 - DNA, 80 bp, synthetic construct
  source 1..80: mol_type = other DNA
ggagtgcagtggtgcaatctcagctcactggaacctctgcctctgggttcaagagattctcctgcctcagcctcccgagt

SEQ ID NO: 105592 - DNA, 80 bp, synthetic construct
  source 1..80: mol_type = other DNA
cagcctcaaatggtctttaatgttggtgtttctttgtatatttgttctggattattataattaaaatgaacaatacattg

SEQ ID NO: 105593 - DNA, 80 bp, synthetic construct; identical to SEQ ID NO: 20404
  source 1..80: mol_type = other DNA

SEQ ID NO: 105594 - DNA, 80 bp, synthetic construct
  source 1..80: mol_type = other DNA
accaggctggagtgcagtggcacgatcttggctcactgcaatctctgcctcctgggttcaagcaattcccctgcctcagc

SEQ ID NO: 105595 - DNA, 80 bp, synthetic construct
  source 1..80: mol_type = other DNA
gagccaccgtgcccggccaaggtagcaggctttaaagcatgacctttagcatgcactttattcttaatgactgaaatttg

SEQ ID NO: 105596 - DNA, 80 bp, synthetic construct
  source 1..80: mol_type = other DNA
cctttagcgtgatggcgtgttcttaatagagctatcagtttagctgtctaagctgttgcttataaagtattccaaaatgg

SEQ ID NO: 105597 - DNA, 80 bp, synthetic construct; identical to SEQ ID NO: 20405
  source 1..80: mol_type = other DNA

SEQ ID NO: 105598 - DNA, 80 bp, synthetic construct
  source 1..80: mol_type = other DNA
agtgcaatagcactattttggctcactgcaacccccacctttcgggtttaagcaattctcctgccttggcctcctgagta

SEQ ID NO: 105599 - DNA, 80 bp, synthetic construct
  source 1..80: mol_type = other DNA
gcacccagctgacaaccagtctttcatgtacaaacaatgagaaggctttagcatagttaggaaatgcccaagttcgagat

SEQ ID NO: 105600 - DNA, 80 bp, synthetic construct
  source 1..80: mol_type = other DNA
tgagataataaaacattatggccatccgggtcactccaaagaaagtttagatgtaaaaggcctcttaataattcaatcat

SEQ ID NO: 105601 - DNA, 80 bp, synthetic construct
  source 1..80: mol_type = other DNA
cctggccaatatgatgaaaccccgtctctgttaaaaatacaaaaattagccgggcatggtggtgcgtgcctgtagtctca

SEQ ID NO: 105602 - DNA, 80 bp, synthetic construct; identical to SEQ ID NO: 20406
  source 1..80: mol_type = other DNA

SEQ ID NO: 105603 - DNA, 80 bp, synthetic construct
  source 1..80: mol_type = other DNA
ggtttatgagctttttttggctactaatcttaatatttcattatatgtgtatggttatatatatacaaatagatggtatt

SEQ ID NO: 105604 - DNA, 80 bp, synthetic construct
  source 1..80: mol_type = other DNA
gccaccatgcctggctaatttttgtatttttagtagagacggagtttcaccatgttggccaggctggtcttgaactcctg

SEQ ID NO: 105605 - DNA, 80 bp, synthetic construct
  source 1..80: mol_type = other DNA
aaaattctcttgataaatagacaaaacatatccattttcaagtatatatatgtatatatatagcaacaactatatctagt

SEQ ID NO: 105606 - DNA, 80 bp, synthetic construct; identical to SEQ ID NO: 20407
  source 1..80: mol_type = other DNA

SEQ ID NO: 105607 - DNA, 80 bp, synthetic construct
  source 1..80: mol_type = other DNA
aggtgactaagagctgacacacagagtaccttcataaacactaatatcacccaaaggcatagggacattctcttaagcat

SEQ ID NO: 105608 - DNA, 80 bp, synthetic construct
  source 1..80: mol_type = other DNA
acagggtaaatggccccaaataagatggtaaaaaagaaaaccagatatggcactaatctctgacagaataaatgggttaa

SEQ ID NO: 105609 - DNA, 80 bp, synthetic construct
  source 1..80: mol_type = other DNA
ctttcaatacaaaccaaaagaaagctggtatatatgtatttatatcattcaaagtagactttagggcaaaaagcattatt

SEQ ID NO: 105610 - DNA, 80 bp, synthetic construct
  source 1..80: mol_type = other DNA
gttcagtggcacatgcctgtagtctcagctacttgggaggctgaggcaggaggattgcaggagcccaggagtttgaagtt

SEQ ID NO: 105611 - DNA, 80 bp, synthetic construct; identical to SEQ ID NO: 20408
  source 1..80: mol_type = other DNA

SEQ ID NO: 105612 - DNA, 80 bp, synthetic construct
  source 1..80: mol_type = other DNA
aatactgatgagtatcacacagaacgacttgaggaggggctcaggatgcaagatgtatctagtactttcttcttctacca

SEQ ID NO: 105613 - DNA, 80 bp, synthetic construct
  source 1..80: mol_type = other DNA
aaagggtaagtgaaagacccccaaatgtccacattcccaccatggttccctgcaatcctagctataggagagtcccttga

SEQ ID NO: 105614 - DNA, 80 bp, synthetic construct; identical to SEQ ID NO: 20409
  source 1..80: mol_type = other DNA

SEQ ID NO: 105615 - DNA, 80 bp, synthetic construct
  source 1..80: mol_type = other DNA
tgatcctcttctagcatagacaaagtcgattcacttggcttatccacaaatgggtcatggacccattccttgccagtttg

SEQ ID NO: 105616 - DNA, 80 bp, synthetic construct
  source 1..80: mol_type = other DNA
tgaaacatgtataaaatcccaatgttcacttatcagccccataattttagtttggctttgaatgcaaccgctttatctgc

SEQ ID NO: 105617 - DNA, 80 bp, synthetic construct
  source 1..80: mol_type = other DNA
cagatttcctttcctgaaagaaatctctggagcggctctcataactcaaaaactctggctagtgatctacctttagaaag

SEQ ID NO: 105618 - DNA, 80 bp, synthetic construct
  source 1..80: mol_type = other DNA
cgtctctactaaaaatacaaaaattagctgggcgtgttggtgtgcacctgtagtcccagctacttgggaggctgaggcgg

SEQ ID NO: 105619 - DNA, 80 bp, synthetic construct; identical to SEQ ID NO: 20410
  source 1..80: mol_type = other DNA

SEQ ID NO: 105620 - DNA, 80 bp, synthetic construct
  source 1..80: mol_type = other DNA
gtatataccgacacaaaatgaccaattcagatttcctgatacgtagtcattcaaatacttggatagttctgcagctgggg

SEQ ID NO: 105621 - DNA, 80 bp, synthetic construct
  source 1..80: mol_type = other DNA
cctcgatatcctctgctatttcatcaattggtctagttatggtactgactggaagaggaacatgtggcaccttttgaact

SEQ ID NO: 105622 - DNA, 80 bp, synthetic construct
  source 1..80: mol_type = other DNA
gccttcagtagtggtggcttctgttctttgtgttcacgttttgttttcttttgaaaaactccaaagcttgtcttttaatg

SEQ ID NO: 105623 - DNA, 80 bp, synthetic construct; identical to SEQ ID NO: 20411
  source 1..80: mol_type = other DNA

SEQ ID NO: 105624 - DNA, 80 bp, synthetic construct
  source 1..80: mol_type = other DNA
attgacatttggttttcactcattttagctagagctagcctgtgggtttaccaaaactgtgactgatacaagttgcgcag

SEQ ID NO: 105625 - DNA, 80 bp, synthetic construct
  source 1..80: mol_type = other DNA
gaattacaggtgtgagctaccgcgcccggccttgatttgcattttttctgatgctcagtattgttgagcaccttttctta

SEQ ID NO: 105626 - DNA, 80 bp, synthetic construct
  source 1..80: mol_type = other DNA
ttctttcattctataggttgtcttttcactttgttgattgtttcttttgctatgcagaagctttttagtttgtaataatc

SEQ ID NO: 105627 - DNA, 80 bp, synthetic construct; identical to SEQ ID NO: 20412
  source 1..80: mol_type = other DNA

SEQ ID NO: 105628 - DNA, 80 bp, synthetic construct
  source 1..80: mol_type = other DNA
tgtactgtattttgaagtctggtagtgtgatgcctttagctttgttccttttgcttagaattgctttagctatttgtgct

SEQ ID NO: 105629 - DNA, 80 bp, synthetic construct
  source 1..80: mol_type = other DNA
ccatttgtttgtatcctttttattcatcaatgttttgtagttttccttgtagaagtttttcacctctttggttaaattta

SEQ ID NO: 105630 - DNA, 80 bp, synthetic construct; identical to SEQ ID NO: 20413
  source 1..80: mol_type = other DNA

SEQ ID NO: 105631 - DNA, 80 bp, synthetic construct
  source 1..80: mol_type = other DNA
gatctcggctcactgcaacctccgcctcccagtttcaagcaattttcctgcctcagcctcccaagtagctgggattacag

SEQ ID NO: 105632 - DNA, 80 bp, synthetic construct
  source 1..80: mol_type = other DNA
ctttagtcttcttgatcaagagtatttctccatctgttttagggttcttttttttttctaaatagttttatcatttttct

SEQ ID NO: 105633 - DNA, 80 bp, synthetic construct
  source 1..80: mol_type = other DNA
ttatttgctgataaatctttagtttcaaaaatttttattatatacaagccaggtatggtagctcatgcttgtaatcctag

SEQ ID NO: 105634 - DNA, 80 bp, synthetic construct
  source 1..80: mol_type = other DNA
ggctggagtttgaggttatagtgagctataatcacaccactgcacttcagcctgggcaacagagtaagaacttgtcaaac

SEQ ID NO: 105635 - DNA, 80 bp, synthetic construct; identical to SEQ ID NO: 20414
  source 1..80: mol_type = other DNA

SEQ ID NO: 105636 - DNA, 80 bp, synthetic construct
  source 1..80: mol_type = other DNA
ctacccaagcatccattgatagataaacggataagcaaaatgtggtctatacgtacaatgggatattattctgccttaaa

SEQ ID NO: 105637 - DNA, 80 bp, synthetic construct
  source 1..80: mol_type = other DNA
gaatctgaggcaggagaatcgcttgaacctggaaggcggaggttgcagtaagccgagatcgcgccattgcactccagcct

SEQ ID NO: 105638 - DNA, 80 bp, synthetic construct
  source 1..80: mol_type = other DNA
aactccatactctctctctctctatatatatatatgtatatatgtaatattttgcaattttgcagaatttacttatttgc

SEQ ID NO: 105639 - DNA, 80 bp, synthetic construct; identical to SEQ ID NO: 20415
  source 1..80: mol_type = other DNA

SEQ ID NO: 105640 - DNA, 80 bp, synthetic construct
  source 1..80: mol_type = other DNA
aagtttggggaaactaaccagaattcaagtgtaaccctggtgtgatttagagttaggggagagaacaaggaaaatcttac

SEQ ID NO: 105641 - DNA, 80 bp, synthetic construct
  source 1..80: mol_type = other DNA
tgaaaaatggctagaaactgggaatgaggctgggacacatgcacatgacctgccctccagatagagactttatttgtttt

SEQ ID NO: 105642 - DNA, 80 bp, synthetic construct; identical to SEQ ID NO: 20416
  source 1..80: mol_type = other DNA

SEQ ID NO: 105643 - DNA, 80 bp, synthetic construct
  source 1..80: mol_type = other DNA
ataggtccaaatgattttttgcggaagccaggaaaaagttctaggaaattgttgggtatcttaagtggaagtgagtgagt

SEQ ID NO: 105644 - DNA, 80 bp, synthetic construct
  source 1..80: mol_type = other DNA
ggaagacaaatgtaaataaatttctcaggccaggcacggtggctcatgcctgtaattcccgcattttggaaggccgaggc

SEQ ID NO: 105645 - DNA, 80 bp, synthetic construct
  source 1..80: mol_type = other DNA
ggtggagtttgcagtgagtggagatcgcaccattgcactccaccctgggcaacagagtgaaactccgtctcaaaataaat

SEQ ID NO: 105646 - DNA, 80 bp, synthetic construct
  source 1..80: mol_type = other DNA
actagaggaccaattaaataaattgtaggatattcatacatataaggtaggtttccttttggctgcaagcagaagaatac

SEQ ID NO: 105647 - DNA, 80 bp, synthetic construct; identical to SEQ ID NO: 20417
  source 1..80: mol_type = other DNA

SEQ ID NO: 105648 - DNA, 80 bp, synthetic construct
  source 1..80: mol_type = other DNA
cagtctctgcattaacaagggagaaaggggctggggatggcctctgggtggtcaaaaatataacatgagtactccattgc

SEQ ID NO: 105649 - DNA, 80 bp, synthetic construct
  source 1..80: mol_type = other DNA
tcaacatgtatatctcctgatgcccgcaccagtactgagtgaaaaactttgctgaatgttcctgtttgtctgaacttaaa

SEQ ID NO: 105650 - DNA, 80 bp, synthetic construct
  source 1..80: mol_type = other DNA
ccagcctggccaacacggtgaaaccctgtctctactaaaaatacaaaaactatcaaggcgtgatggtgcacatctgcagt

SEQ ID NO: 105651 - DNA, 80 bp, synthetic construct; identical to SEQ ID NO: 20418
  source 1..80: mol_type = other DNA

SEQ ID NO: 105652 - DNA, 80 bp, synthetic construct
  source 1..80: mol_type = other DNA
tggatgatgagtatttgtgcaagttttaaactttttataataaaagttgtttttccaatcttattgtgttaaaatataaa

SEQ ID NO: 105653 - DNA, 80 bp, synthetic construct
  source 1..80: mol_type = other DNA
cttctggtctctggcaaccaccattctactttatgtttttatccatttgactattccaagccttatataagtgggatcat

SEQ ID NO: 105654 - DNA, 80 bp, synthetic construct; identical to SEQ ID NO: 20419
  source 1..80: mol_type = other DNA

SEQ ID NO: 105655 - DNA, 80 bp, synthetic construct
  source 1..80: mol_type = other DNA
tgtgggagctacaagatgagatttgggtggggacacagagccaaaccatctcactatctgttttttttgtttttgttttt

SEQ ID NO: 105656 - DNA, 80 bp, synthetic construct
  source 1..80: mol_type = other DNA
gggattacaggcacaagccaccacacccagctaatttttgtatttttagtagagacggggtttcaccatgttggccagga

SEQ ID NO: 105657 - DNA, 80 bp, synthetic construct
  source 1..80: mol_type = other DNA
attcatatcttagacgtcaggaataaaggagtggcactttctgttgtccaccagttttcctgtttctaatctgaatattc

SEQ ID NO: 105658 - DNA, 80 bp, synthetic construct
  source 1..80: mol_type = other DNA
gccaggtgtggtggtgggcacctgtaatcccagttacttgggaagctgaagtaggagaactgcttgaacctgggaggcgg

SEQ ID NO: 105659 - DNA, 80 bp, synthetic construct; identical to SEQ ID NO: 20420
  source 1..80: mol_type = other DNA

SEQ ID NO: 105660 - DNA, 80 bp, synthetic construct
  source 1..80: mol_type = other DNA
ctatagggtatcttcaactcaatgtacattttaaccgaaacacactcagcatctcacctaaacacgatcaatatgggcct

SEQ ID NO: 105661 - DNA, 80 bp, synthetic construct
  source 1..80: mol_type = other DNA
aaataaaatttaaaagaacctcccatggagaggagacattgccattttccatgaggtacagaagcccacgtttctgagtt

SEQ ID NO: 105662 - DNA, 80 bp, synthetic construct; identical to SEQ ID NO: 20421
  source 1..80: mol_type = other DNA

SEQ ID NO: 105663 - DNA, 80 bp, synthetic construct
  source 1..80: mol_type = other DNA
ctcgacctccggggctcaagccatcctcccacctcagcttcccaagtaacgagactacaggtgtacaccaccatgcccgt

SEQ ID NO: 105664 - DNA, 80 bp, synthetic construct
  source 1..80: mol_type = other DNA
acatgtgcatcttcccctgtttcctgtgtttgctttcataagtccactgctcctgctgtgaagatgggtacattcatctg

SEQ ID NO: 105665 - DNA, 80 bp, synthetic construct
  source 1..80: mol_type = other DNA
cgtggtggctcacgcctgtaatcccagtactttgggaggccaaggtgagtggatcacttgaggtcaggagttcgcgacca

SEQ ID NO: 105666 - DNA, 80 bp, synthetic construct; identical to SEQ ID NO: 20422
  source 1..80: mol_type = other DNA

SEQ ID NO: 105667 - DNA, 80 bp, synthetic construct; identical to SEQ ID NO: 20423
  source 1..80: mol_type = other DNA

SEQ ID NO: 105668 - DNA, 80 bp, synthetic construct
  source 1..80: mol_type = other DNA
accaaccactgttaagactgaatcaaagggcagcaggcggactacccggaatgaagaaagcaatcaataaatgtggattg

SEQ ID NO: 105669 - DNA, 80 bp, synthetic construct
  source 1..80: mol_type = other DNA
cagcaaggaacggaagccaggttgtcaagcctcagttggctttcacgtattctccttttcaggcgggtatttaggaagag

SEQ ID NO: 105670 - DNA, 80 bp, synthetic construct
  source 1..80: mol_type = other DNA
tccagataactttttttttttaacaaagcaggggtgggggtgggagattcctgctgttaaaaacaaacaaagggcttaga

SEQ ID NO: 105671 - DNA, 80 bp, synthetic construct
  source 1..80: mol_type = other DNA
ttgctttttttgaatacacaaactctccgaaaactcctgtcttgccccacttttttgtgagttcattgctttggaaacaa

SEQ ID NO: 105672 - DNA, 80 bp, synthetic construct; identical to SEQ ID NO: 20424
  source 1..80: mol_type = other DNA

SEQ ID NO: 105673 - DNA, 80 bp, synthetic construct
  source 1..80: mol_type = other DNA
gcacacgttcccgaggctctcggccggtgtgatctcaccgactagagaataaaaacagcccaggggcgccggcgccggcc

SEQ ID NO: 105674 - DNA, 80 bp, synthetic construct
  source 1..80: mol_type = other DNA
caactccaaccgagccgcccgagtgtggactccgagagcggacgccacgggccgcgctcagccctcccgcccgaggcccc

SEQ ID NO: 105675 - DNA, 80 bp, synthetic construct
  source 1..80: mol_type = other DNA
agggggcgggcagggcgcccgcgggaggaggtggcggggcgcgggggaggaggcggggagccccggcggcgagggggcgg

SEQ ID NO: 105676 - DNA, 80 bp, synthetic construct; identical to SEQ ID NO: 20425
  source 1..80: mol_type = other DNA

SEQ ID NO: 105677 - DNA, 80 bp, synthetic construct
  source 1..80: mol_type = other DNA
gggccgcgcgccgagccccgcaggctgcagcgccgcggcccggcccggcgccccggcaacttcgccgagagttgaggcga

SEQ ID NO: 105678 - DNA, 80 bp, synthetic construct
  source 1..80: mol_type = other DNA
ggctggaagaagggcgagcagaacgggcaggaggagaaatggtgcgagaaggcggtcaagagcctggtcaagaaactcaa

SEQ ID NO: 105679 - DNA, 80 bp, synthetic construct
  source 1..80: mol_type = other DNA
tgggaagagggagagagagggagggagtgagactgtgtgggtgcgtgtgtgtgagagtgggagagcgcgggcaggaaggg

SEQ ID NO: 105680 - DNA, 80 bp, synthetic construct
  source 1..80: mol_type = other DNA
gttgctgcgggactcggccgcccccactccggggagctggggctggaagttgaggcccgctttgttcggctccgcgggcc

SEQ ID NO: 105681 - DNA, 80 bp, synthetic construct; identical to SEQ ID NO: 20426
  source 1..80: mol_type = other DNA

SEQ ID NO: 105682 - DNA, 80 bp, synthetic construct
  source 1..80: mol_type = other DNA
cttttgcccttcttttggtccaagagattttgaaaccgtgcagaacgagggagaggggcaggctgcagccgggcagataa

SEQ ID NO: 105683 - DNA, 80 bp, synthetic construct
  source 1..80: mol_type = other DNA
gacttcactcccccagggccttccttagcttagatgtgcctggctgggaactgggggtgcgggtaccttggcttcctgtc

SEQ ID NO: 105684 - DNA, 80 bp, synthetic construct
  source 1..80: mol_type = other DNA
tccatccttggccacctgcttggggcagttgtacaggggctgccaggcgagtcaggcaggcacaaagcaacatctgtcca

SEQ ID NO: 105685 - DNA, 80 bp, synthetic construct; identical to SEQ ID NO: 20427
  source 1..80: mol_type = other DNA

SEQ ID NO: 105686 - DNA, 80 bp, synthetic construct
  source 1..80: mol_type = other DNA
caggcagctgtgaaaagtgtttcacagtttacaaagcactttcacatggttttctgaggtcctcaaaaaaagacagaaag

SEQ ID NO: 105687 - DNA, 80 bp, synthetic construct
  source 1..80: mol_type = other DNA
tctgcctgaatgtgctctttctgctgccccatgctgctttatactttgaagatcctgaatacattctttgctgaatgcta

SEQ ID NO: 105688 - DNA, 80 bp, synthetic construct; identical to SEQ ID NO: 20428
  source 1..80: mol_type = other DNA

SEQ ID NO: 105689 - DNA, 80 bp, synthetic construct
  source 1..80: mol_type = other DNA
ggtggatccagacaaaatggattttcatccttggattttgtgcccacgcctctgggtcaccttgtgtcccttggcaacag

SEQ ID NO: 105690 - DNA, 80 bp, synthetic construct
  source 1..80: mol_type = other DNA
gaaagtagagaaaggaaaatgtttaacttagtcattccccctgtgtgtggggggttggtcactgggtgcttaaaaacact

SEQ ID NO: 105691 - DNA, 80 bp, synthetic construct
  source 1..80: mol_type = other DNA
ccagctctgacttgtttcaattatcaggggagctggcgtgatacacacttatcgacataaagaaggtgaaagagattggt

SEQ ID NO: 105692 - DNA, 80 bp, synthetic construct; identical to SEQ ID NO: 20429
  source 1..80: mol_type = other DNA

SEQ ID NO: 105693 - DNA, 80 bp, synthetic construct
  source 1..80: mol_type = other DNA
ggaaaattggagaattgaagcaaacactaggtctgacacacagcatctactccctccctgtgaatctgatgttttttttt

SEQ ID NO: 105694 - DNA, 80 bp, synthetic construct
  source 1..80: mol_type = other DNA
ttacaggcgcccgccaccacgcccagctaatttttgtatttttagtagagacggggtttcaccatgttggtcaggctggt

SEQ ID NO: 105695 - DNA, 80 bp, synthetic construct
  source 1..80: mol_type = other DNA
agatcctagtctttaacatgccttttccagatttctggggatagacctattactaaggctgtagaggcctcccttttctc

SEQ ID NO: 105696 - DNA, 80 bp, synthetic construct
  source 1..80: mol_type = other DNA
agctgatgagggatctgactcagctgcagctgaacctaggcgccacttgacgttccctgggaacatttagaaccttggaa

SEQ ID NO: 105697 - DNA, 80 bp, synthetic construct; identical to SEQ ID NO: 20430
  source 1..80: mol_type = other DNA

SEQ ID NO: 105698 - DNA, 80 bp, synthetic construct
  source 1..80: mol_type = other DNA
tctgtttttttctgaaaaaaacacaaaattcaggtcctgtacctgccattttaccacctgcaaggatttgggaatccatt

SEQ ID NO: 105699 - DNA, 80 bp, synthetic construct
  source 1..80: mol_type = other DNA
tcattcattattgaattattcagtccttcgttgagaacatactacaatgaccacagcagggtccctgtactcaaagagct

SEQ ID NO: 105700 - DNA, 80 bp, synthetic construct; identical to SEQ ID NO: 20431
  source 1..80: mol_type = other DNA

SEQ ID NO: 105701 - DNA, 80 bp, synthetic construct
  source 1..80: mol_type = other DNA
aattcaggtttccttggtgggaacagggactttagatgtatcagctcagaatatgacagggagtgttaataaaaagtgga

SEQ ID NO: 105702 - DNA, 80 bp, synthetic construct
  source 1..80: mol_type = other DNA
ctactaaaaatacaaaaaaattagccgagcttggtggcaggcgcctgtagtcccagctactcgggaggctgaggcaagag

SEQ ID NO: 105703 - DNA, 80 bp, synthetic construct
  source 1..80: mol_type = other DNA
caacttgcagatggttgttttgaaattcaaagcttcggtgtgacctagcttctcatttctctagttaacacttgctgaga

SEQ ID NO: 105704 - DNA, 80 bp, synthetic construct
  source 1..80: mol_type = other DNA
acagtcgcatttaattctgatgagaaatgcaagaagttgatgaaattgaaagaatttgtttcaagcttatcacatcagga

SEQ ID NO: 105705 - DNA, 80 bp, synthetic construct; identical to SEQ ID NO: 20432
  source 1..80: mol_type = other DNA

SEQ ID NO: 105706 - DNA, 80 bp, synthetic construct
  source 1..80: mol_type = other DNA
ctgattaaaacaaaagcaaaacttaaagactccattccctcccccaaatccccatctcatagtgttggttggctggcaag

SEQ ID NO: 105707 - DNA, 80 bp, synthetic construct
  source 1..80: mol_type = other DNA
atggttcctggaaacagtgggaagttgccatcctaagcccaccctacagaagtttggtttctaattttactgtgttctaa

SEQ ID NO: 105708 - DNA, 80 bp, synthetic construct
  source 1..80: mol_type = other DNA
gctgtgaaacacaggttctttggagttgtaagaatgctgtatgtgttcactctttagctaatttgtaaatactgtttttt

SEQ ID NO: 105709 - DNA, 80 bp, synthetic construct; identical to SEQ ID NO: 20433
  source 1..80: mol_type = other DNA

SEQ ID NO: 105710 - DNA, 80 bp, synthetic construct
  source 1..80: mol_type = other DNA
gattattttggaggtaggagtcagcagaccttggtaggttctagacgtggctctgtttctgattagctgtgtgacctggg

SEQ ID NO: 105711 - DNA, 80 bp, synthetic construct
  source 1..80: mol_type = other DNA
aaagtgcaatggcgcggtcttgcctcactgcaacctccgcttcccaggttcaagtgattgtcctgcctcagccttctgag

SEQ ID NO: 105712 - DNA, 80 bp, synthetic construct; identical to SEQ ID NO: 20434
  source 1..80: mol_type = other DNA

SEQ ID NO: 105713 - DNA, 80 bp, synthetic construct
  source 1..80: mol_type = other DNA
aatatgaaaataatgctaggatgaagatgtggaggctgtgcctcttgagatgcagtgaacagtttttcttcttttgttgc

SEQ ID NO: 105714 - DNA, 80 bp, synthetic construct
  source 1..80: mol_type = other DNA
tgtcaaagtttacccaggaagcttcctttatttatttccaagcatctatataaagaaaggctgcacttgattgcgtaagc

SEQ ID NO: 105715 - DNA, 80 bp, synthetic construct
  source 1..80: mol_type = other DNA
ggcaagtttttctcttgagtgctttgccggtagtttaggactccagtattgtattgtattgtttgtttgtttctttatct

SEQ ID NO: 105716 - DNA, 80 bp, synthetic construct; identical to SEQ ID NO: 20435
  source 1..80: mol_type = other DNA

SEQ ID NO: 105717 - DNA, 80 bp, synthetic construct
  source 1..80: mol_type = other DNA
gtctgtttttacgctgtcactgctcaaaaatgccaaaaggcattttttccttaaaaaatcacctctgggctaagcccaaa

SEQ ID NO: 105718 - DNA, 80 bp, synthetic construct
  source 1..80: mol_type = other DNA
tttccttttgcttcaaatcttcctggttgtaaactttttcttacccttattgaagtcagactcaaggtgggtctaatttc

SEQ ID NO: 105719 - DNA, 80 bp, synthetic construct
  source 1..80: mol_type = other DNA
agcctctcaagtctgatgggtttgggtttgagtctgacagttattagctatgtggtgaccttgggtactttgcttcaact

SEQ ID NO: 105720 - DNA, 80 bp, synthetic construct
  source 1..80: mol_type = other DNA
tgaccaatatggtgaaacctcggctctactaaaaatataaaaattagccgggcatggtagcgggcgcctgtaatttcagc

SEQ ID NO: 105721 - DNA, 80 bp, synthetic construct; identical to SEQ ID NO: 20436
  source 1..80: mol_type = other DNA

SEQ ID NO: 105722 - DNA, 80 bp, synthetic construct
  source 1..80: mol_type = other DNA
atacagacatgccacttgttgatgtaaggcttggcaggctattgaaagagaaacaattcatattcttaggcggttctgcc

SEQ ID NO: 105723 - DNA, 80 bp, synthetic construct
  source 1..80: mol_type = other DNA
ctgcccgtaagtgcatggaagtgcatgatgtttattgttgctggtgtttttttgaggcccaagttggaatgcacttccgg

SEQ ID NO: 105724 - DNA, 80 bp, synthetic construct
  source 1..80: mol_type = other DNA
ggccctccacctggctgtgctcctcttactggggcaaggagactgtagggccaagggacaggcccatctagagcaagcac

SEQ ID NO: 105725 - DNA, 80 bp, synthetic construct; identical to SEQ ID NO: 20437
  source 1..80: mol_type = other DNA

SEQ ID NO: 105726 - DNA, 80 bp, synthetic construct
  source 1..80: mol_type = other DNA
cattctgtgtaaccgtttgttaccttgatttgtctttaaatactacatatggtgtgtaggccttcctctgtatttttgct

SEQ ID NO: 105727 - DNA, 80 bp, synthetic construct
  source 1..80: mol_type = other DNA
ttccctcaccctcaacccaggccagagtgaatttaatgcagatgagggagaaggtgctacatattatagctgctcattca

SEQ ID NO: 105728 - DNA, 80 bp, synthetic construct; identical to SEQ ID NO: 20438
  source 1..80: mol_type = other DNA

SEQ ID NO: 105729 - DNA, 80 bp, synthetic construct
  source 1..80: mol_type = other DNA
ggagttggagaaggatgttgtcaagggctttggcttgccaaacttcgtactttgtgtttggaccttgctctgtaagtgtc

SEQ ID NO: 105730 - DNA, 80 bp, synthetic construct
  source 1..80: mol_type = other DNA
aggctatgtctggagcaggttgaagatagtgttttgttcactgtcaggagagaagacatgttgttcagccaggagggctc

SEQ ID NO: 105731 - DNA, 80 bp, synthetic construct
  source 1..80: mol_type = other DNA
cagtgttttcaatttctttgttgatgatcatcaatcaaggccaggctttccaattccagaccacactgcaatcagtggaa

SEQ ID NO: 105732 - DNA, 80 bp, synthetic construct; identical to SEQ ID NO: 20439
  source 1..80: mol_type = other DNA

SEQ ID NO: 105733 - DNA, 80 bp, synthetic construct
  source 1..80: mol_type = other DNA
ctcatcagtaaaatgggaaaaacaatgacctccctcaaggagggatgttattgaagttatttacttaaatcagattagat

SEQ ID NO: 105734 - DNA, 80 bp, synthetic construct
  source 1..80: mol_type = other DNA
attctcctgcctcagcctcccgagtagctgggattacaggcatgcaccaccatgcctggctaattttgtatttttagtaa

SEQ ID NO: 105735 - DNA, 80 bp, synthetic construct
  source 1..80: mol_type = other DNA
aaaaaccctttctgacagagatgggagttaaggcttctaagttcacacccagatttccacagagaccttagagacaatca

SEQ ID NO: 105736 - DNA, 80 bp, synthetic construct
  source 1..80: mol_type = other DNA
ctgttactcttggccatgtccaagcatttgactcagaagatggtcgagtcagcagtgttgactgttagcaaatcacctaa

SEQ ID NO: 105737 - DNA, 80 bp, synthetic construct; identical to SEQ ID NO: 20440
  source 1..80: mol_type = other DNA

SEQ ID NO: 105738 - DNA, 80 bp, synthetic construct
  source 1..80: mol_type = other DNA
gctaagggctggagctggatttgccactgaagctctacaccttctagaatctagggtgactacataatttatcaaacaaa

SEQ ID NO: 105739 - DNA, 80 bp, synthetic construct
  source 1..80: mol_type = other DNA
ccagctcatgtgctgttgcttaagtggaagggaatgtgcaaattatgtcctgctattctaagtgaaaggacttgcccaag

SEQ ID NO: 105740 - DNA, 80 bp, synthetic construct; identical to SEQ ID NO: 20441
  source 1..80: mol_type = other DNA

SEQ ID NO: 105741 - DNA, 80 bp, synthetic construct
  source 1..80: mol_type = other DNA
gacctgacttttcctgctctccactttactttagctctgggcttcaaagggactattggctgggagtggtgaaagtttag

SEQ ID NO: 105742 - DNA, 80 bp, synthetic construct
  source 1..80: mol_type = other DNA
gaattctgcagagaacatgtaagggctgtgctgtttcactcctgctttgggctctcagggtttgtttccgcgatcatcca

SEQ ID NO: 105743 - DNA, 80 bp, synthetic construct
  source 1..80: mol_type = other DNA
gagaaatgtgaaatataaattcaaaccaaacttggcacctgtttggagagcttcagctgatactacagtgcccctgtcgt

SEQ ID NO: 105744 - DNA, 80 bp, synthetic construct
  source 1..80: mol_type = other DNA
tggtgtcatggggatgactaggccatcttgtgggtaaggctggaagcggcttttgagtctcctgagttacagctcttctt

SEQ ID NO: 105745 - DNA, 80 bp, synthetic construct; identical to SEQ ID NO: 20442
  source 1..80: mol_type = other DNA

SEQ ID NO: 105746 - DNA, 80 bp, synthetic construct
  source 1..80: mol_type = other DNA
aaaccttccccgggagcctcctggtatcttgttggtcagtattgtatcacatgcagtcaatgacagaaataatggaccct

SEQ ID NO: 105747 - DNA, 80 bp, synthetic construct
  source 1..80: mol_type = other DNA
aacttactgattaatgtttgttggttgctggtttccttcgctaagtgagactcctgaacacttactgatgatgtcttgct

SEQ ID NO: 105748 - DNA, 80 bp, synthetic construct
  source 1..80: mol_type = other DNA
aagaggtgttaaattgaggcccaaggagacaaaaggacctgagaaacagagcagggggactgtctgggcctctgaatgcc

SEQ ID NO: 105749 - DNA, 80 bp, synthetic construct; identical to SEQ ID NO: 20443
  source 1..80: mol_type = other DNA

SEQ ID NO: 105750 - DNA, 80 bp, synthetic construct
  source 1..80: mol_type = other DNA
agatagggaatacccttgagtcttcagtcgcaaagagctaatcactaacttcaagtgtgcaagtgccctttcattccaat

SEQ ID NO: 105751 - DNA, 80 bp, synthetic construct
  source 1..80: mol_type = other DNA
tttcctattgatctaggagctgggataacttggaaccccagggaacatctcagagttaattagttttttgaggtcttctt

SEQ ID NO: 105752 - DNA, 80 bp, synthetic construct
  source 1..80: mol_type = other DNA
agaggtgcctttgagcatgggcctggaaccaacagctactttcctggaaaattcttcagtttccagaagcagtggccagg

SEQ ID NO: 105753 - DNA, 80 bp, synthetic construct; identical to SEQ ID NO: 20444
  source 1..80: mol_type = other DNA

SEQ ID NO: 105754 - DNA, 80 bp, synthetic construct
  source 1..80: mol_type = other DNA
tatctgctttaacttcaacgatgagaaaatcaaaccatatgctggacatcattctgcccagctgggctgagtcagaattg

SEQ ID NO: 105755 - DNA, 80 bp, synthetic construct
  source 1..80: mol_type = other DNA
ttcttcttctttctcctcacacaacctactctgatgttcatgattactggagcccccaggttctaaaaagtgttgaatta

SEQ ID NO: 105756 - DNA, 80 bp, synthetic construct; identical to SEQ ID NO: 20445
  source 1..80: mol_type = other DNA

SEQ ID NO: 105757 - DNA, 80 bp, synthetic construct
  source 1..80: mol_type = other DNA
gtagctggcactacaggcgtctgccaccacacctggctaattttttttttttgtatttttagtagagacggggtttcttt

SEQ ID NO: 105758 - DNA, 80 bp, synthetic construct
  source 1..80: mol_type = other DNA
tcaatgcatatattttcctgggggacaaatctaagttttcatctgatgctctgccttcagaggggaaccattccttaatg

SEQ ID NO: 105759 - DNA, 80 bp, synthetic construct
  source 1..80: mol_type = other DNA
gaaatcagtctgcaggcaaagaggaattcaaatttagcctgaagcacaggttttctgtgcttctaggcaccggctgcatt

SEQ ID NO: 105760 - DNA, 80 bp, synthetic construct; identical to SEQ ID NO: 20446
  source 1..80: mol_type = other DNA

SEQ ID NO: 105761 - DNA, 80 bp, synthetic construct
  source 1..80: mol_type = other DNA
ttgtcaccgtttttgtccagcggctgtcaccataggggctcctctggtgtggaggagagagaattagaggcagcaggcct

SEQ ID NO: 105762 - DNA, 80 bp, synthetic construct
  source 1..80: mol_type = other DNA
caaagaaatgactctattactcatttgaatagtttcagaatcactgtatagtcaactctggactagaaatgggggcctgc

SEQ ID NO: 105763 - DNA, 80 bp, synthetic construct
  source 1..80: mol_type = other DNA
ccagtgaatttcaaatttctacaggccggcctggggaaatccatgttttttaactttcctaggtgattccggtatgtggc

SEQ ID NO: 105764 - DNA, 80 bp, synthetic construct
  source 1..80: mol_type = other DNA
tctggaagtgtgttgatttggtcaccacaagtgctggtggtgagtagttgccctgaggtttggagttccagttccctcct

SEQ ID NO: 105765 - DNA, 80 bp, synthetic construct; identical to SEQ ID NO: 20447
  source 1..80: mol_type = other DNA

SEQ ID NO: 105766 - DNA, 80 bp, synthetic construct
  source 1..80: mol_type = other DNA
aagggaatcagtatctacagcctaagaaatctgatgggacacatctctctgcattaaaatattaacagaaaaggtcaaac

SEQ ID NO: 105767 - DNA, 80 bp, synthetic construct
  source 1..80: mol_type = other DNA
aaataacaaggtttgagatgcagttgtagacacatgccagatgtaggttgctattttctcagctcaatgaggaatctgtc

SEQ ID NO: 105768 - DNA, 80 bp, synthetic construct; identical to SEQ ID NO: 20448
  source 1..80: mol_type = other DNA

SEQ ID NO: 105769 - DNA, 80 bp, synthetic construct
  source 1..80: mol_type = other DNA
ctgccaccacacctggctaatttttagtagagatggggtttcactatgttggccagattggtcttgaactcctgacttca

SEQ ID NO: 105770 - DNA, 80 bp, synthetic construct
  source 1..80: mol_type = other DNA
aaaattctctgctttcaggaatacactttcctctaggttttttctttgtctgcaagtgggggggtgttctttgccagatc

SEQ ID NO: 105771 - DNA, 80 bp, synthetic construct
  source 1..80: mol_type = other DNA
gggagtgattatctgtgcatcagaaaactcaagattgtcatgtgagcaagttgtgtgatcatcagtaaatgcagagctgg

SEQ ID NO: 105772 - DNA, 80 bp, synthetic construct
  source 1..80: mol_type = other DNA
tatatagacgtgtgtgtttgtgcatgtgtttaaaaaaagacttatattttctgggcagcagaacttaagtttccagtaaa

SEQ ID NO: 105773 - DNA, 80 bp, synthetic construct; identical to SEQ ID NO: 20449
  source 1..80: mol_type = other DNA

SEQ ID NO: 105774 - DNA, 80 bp, synthetic construct
  source 1..80: mol_type = other DNA
agggttacttgatgctaaacggctttcccgatagacttgggatctcactgttcttgtcttagctttacttgttgggttgg

SEQ ID NO: 105775 - DNA, 80 bp, synthetic construct
  source 1..80: mol_type = other DNA
gggaaacacagtggtgtttggctgctgcttcacaccacttttaattcagcgctgctaggaaggctatttcagaatgctcc

SEQ ID NO: 105776 - DNA, 80 bp, synthetic construct
  source 1..80: mol_type = other DNA
ctaaaaatacaaaaatgagccaggtgtggtggcgggtgcctgtagtcccagctactcaggaggctgaggcaggagaatca

SEQ ID NO: 105777 - DNA, 80 bp, synthetic construct; identical to SEQ ID NO: 20450
  source 1..80: mol_type = other DNA

SEQ ID NO: 105778 - DNA, 80 bp, synthetic construct
  source 1..80: mol_type = other DNA
tgccagatgacccttgctactttactgttttttctttgagcctcttggtgatcttgaatagcagaaaaatgagccaaatt

SEQ ID NO: 105779 - DNA, 80 bp, synthetic construct
  source 1..80: mol_type = other DNA
caactgccctgggtggagacatggcaaggtggtcctatccctattttgcaggtgatcaggcacaacttacagttagcgca

SEQ ID NO: 105780 - DNA, 80 bp, synthetic construct; identical to SEQ ID NO: 20451
  source 1..80: mol_type = other DNA

SEQ ID NO: 105781 - DNA, 80 bp, synthetic construct
  source 1..80: mol_type = other DNA
gcaccactgcatgttgggggtggggaagcatgagctggatggagcattcggtggtctaaccagtggccagcagtagtgtt

SEQ ID NO: 105782 - DNA, 80 bp, synthetic construct
  source 1..80: mol_type = other DNA
ggcactgggagtggctggagtcggggttcaccttactcagggtcagggcttcccattttgcaggactgagaggtggactc

SEQ ID NO: 105783 - DNA, 80 bp, synthetic construct
  source 1..80: mol_type = other DNA
catttcacctctctgaacttcaacttgggggtactcagatttccttcagaggctgtgaaagagtcccctgccacaagtta

SEQ ID NO: 105784 - DNA, 80 bp, synthetic construct
  source 1..80: mol_type = other DNA
gcagggtggtaaacacttctcaatgcttgcttatgggctctgatgtgaaccactcactataggctgaatcctggttttcc

SEQ ID NO: 105785 - DNA, 80 bp, synthetic construct; identical to SEQ ID NO: 20452
  source 1..80: mol_type = other DNA

SEQ ID NO: 105786 - DNA, 80 bp, synthetic construct
  source 1..80: mol_type = other DNA
tcatggagtctgtttcttttgattttaattgtgccctctggagagaaagatcctcgaaatggtggaaaaagaagatacca

SEQ ID NO: 105787 - DNA, 80 bp, synthetic construct
  source 1..80: mol_type = other DNA
tggcttccaggccagagcctgacaggagagataggacctgcctccacggtaacaaatggctgaaggcggtttggggtgtt

SEQ ID NO: 105788 - DNA, 80 bp, synthetic construct
  source 1..80: mol_type = other DNA
aaggtgtttttagaaatgaaagtacagggattggtttccttagattcattgtcatggattcatagttccccaaccttttt

SEQ ID NO: 105789 - DNA, 80 bp, synthetic construct; identical to SEQ ID NO: 20453
  source 1..80: mol_type = other DNA

SEQ ID NO: 105790 - DNA, 80 bp, synthetic construct
  source 1..80: mol_type = other DNA
caccagtgggcctgtctagagcagttgcagctgcttctaaaattgccgacccaaggtagaaaaggagagaggggagaaac

SEQ ID NO: 105791 - DNA, 80 bp, synthetic construct
  source 1..80: mol_type = other DNA
aactggacttggaccagcacagggtgcaagcctgatgctctaattttatattttatcagcattttcttatatgtggcttt

SEQ ID NO: 105792 - DNA, 80 bp, synthetic construct
  source 1..80: mol_type = other DNA
aggccccgcccccaggcctcttggatcagaaaccctgagggcggtcccagcagtctgaattttgtacactctccgagggc

SEQ ID NO: 105793 - DNA, 80 bp, synthetic construct; identical to SEQ ID NO: 20454
  source 1..80: mol_type = other DNA

SEQ ID NO: 105794 - DNA, 80 bp, synthetic construct
  source 1..80: mol_type = other DNA
tctgaaaatcaatgatgaacacttaggaggcttgtagcctgctttgagtcaacaggaagactggacttgagagtttggaa

SEQ ID NO: 105795 - DNA, 80 bp, synthetic construct
  source 1..80: mol_type = other DNA
gggcatatccttaacctctctgagatgtacttttcttatctgtaaaacctctatgttgatgcaaatcaggtgcgatgatg

SEQ ID NO: 105796 - DNA, 80 bp, synthetic construct; identical to SEQ ID NO: 20455
  source 1..80: mol_type = other DNA

SEQ ID NO: 105797 - DNA, 80 bp, synthetic construct
  source 1..80: mol_type = other DNA
agggaaagaggaactgggtcggggtgcctgctgacttgcagcgctgtgttggcatgcgaggtagcactggttgggaggcg

SEQ ID NO: 105798 - DNA, 80 bp, synthetic construct
  source 1..80: mol_type = other DNA
ccctgttgatggctgaggaagccaaggctctgagaaggcacatggtttacccgaggggacacaggcaaggaatctgaacc

SEQ ID NO: 105799 - DNA, 80 bp, synthetic construct
  source 1..80: mol_type = other DNA
ggacccaggaagtcagcctgcacctcggcgagtcagaagatgtggccatccaccaaccatcagatgttcccctacgctta

SEQ ID NO: 105800 - DNA, 80 bp, synthetic construct
  source 1..80: mol_type = other DNA
ttacctggctgccttctaaagcagacttggcacgagacaatcttattcaaactctgctcaaaattgctaccctgaggaga

SEQ ID NO: 105801 - DNA, 80 bp, synthetic construct; identical to SEQ ID NO: 20456
  source 1..80: mol_type = other DNA

SEQ ID NO: 105802 - DNA, 80 bp, synthetic construct
  source 1..80: mol_type = other DNA
agcgtttggagtcaagagttgcactcttttttcttgcattaaatgcacttgagttttaacccagtctctgggcggatggc

SEQ ID NO: 105803 - DNA, 80 bp, synthetic construct
  source 1..80: mol_type = other DNA
atgttacctgtctgttagggttgtaagattgagtcaacatatgtacaaggcattgcttagtgtttaccaccttgctgtga

SEQ ID NO: 105804 - DNA, 80 bp, synthetic construct; identical to SEQ ID NO: 20457
  source 1..80: mol_type = other DNA

SEQ ID NO: 105805 - DNA, 80 bp, synthetic construct
  source 1..80: mol_type = other DNA
gtcatcaaggccatcttcatgggcacgtgacgagtacagtcacatagagttcatgctcaggagggccctatgcttggttt

SEQ ID NO: 105806 - DNA, 80 bp, synthetic construct
  source 1..80: mol_type = other DNA
tgcttcagcctcccgagtagctgggattacaggcacctgccaccacacccagctaatttttgtatttcttttagtagacg

SEQ ID NO: 105807 - DNA, 80 bp, synthetic construct
  source 1..80: mol_type = other DNA
tcttaataattttctctttgacctagtgttttggagcatgagcatggatagaggagatgtgggcagcatgtgcccattga

SEQ ID NO: 105808 - DNA, 80 bp, synthetic construct; identical to SEQ ID NO: 20458
  source 1..80: mol_type = other DNA

SEQ ID NO: 105809 - DNA, 80 bp, synthetic construct
  source 1..80: mol_type = other DNA
aaacgattgagttagctttatggatgtttctctggttctggtacatcacaaaatgcacatccaagtcctaaaatacaatt

SEQ ID NO: 105810 - DNA, 80 bp, synthetic construct
  source 1..80: mol_type = other DNA
aaaaataccatgacacatcaagagagagactgtggaggaaagagaaaaagctttctattttagtaccatgattgatactt

SEQ ID NO: 105811 - DNA, 80 bp, synthetic construct; identical to SEQ ID NO: 20459
  source 1..80: mol_type = other DNA

SEQ ID NO: 105812 - DNA, 80 bp, synthetic construct
  source 1..80: mol_type = other DNA
gttgttaaaaatgtgggtacttggaggctgaattcttgggtcaaatcttatctccatctctctgtcctttttttgtggtt

SEQ ID NO: 105813 - DNA, 80 bp, synthetic construct
  source 1..80: mol_type = other DNA
ttgttttttgttgttgttttttgtagaaacagagtttcactatgttgccccaggctagtctcaaacttgtgagctcaggc

SEQ ID NO: 105814 - DNA, 80 bp, synthetic construct
  source 1..80: mol_type = other DNA
tatcttatagcatggtcatgagcgtgaaatgagagcagggggaggagtaatcattgtgtctggtccatgggactgaatca

SEQ ID NO: 105815 - DNA, 80 bp, synthetic construct; identical to SEQ ID NO: 20460
  source 1..80: mol_type = other DNA

SEQ ID NO: 105816 - DNA, 80 bp, synthetic construct
  source 1..80: mol_type = other DNA
ttaagtactggtgttaggaagagctaacacggtgagtcttcagtgtttctttaagtgctgctcactactgtcctgagaga

SEQ ID NO: 105817 - DNA, 80 bp, synthetic construct
  source 1..80: mol_type = other DNA
caagcaagcaagcaagccagcaggatttggaatcgtcccctaattggaaccacaatcgcaggtttcagggactcaggaaa

SEQ ID NO: 105818 - DNA, 80 bp, synthetic construct
  source 1..80: mol_type = other DNA
gtacatttgaggcccagatctgcttatttcgagggtggggccgcgtttttctcctgccacagtgagctaattaaagaaaa

SEQ ID NO: 105819 - DNA, 80 bp, synthetic construct
  source 1..80: mol_type = other DNA
ggatttggggacggtgggagggcatacatggatgggagggtggactccgttcctgagggggccagtgtggaggagggtca

SEQ ID NO: 105820 - DNA, 80 bp, synthetic construct; identical to SEQ ID NO: 20461
  source 1..80: mol_type = other DNA

SEQ ID NO: 105821 - DNA, 80 bp, synthetic construct
  source 1..80: mol_type = other DNA
aggtgtgttgttgaaatgttgattatgcaaattgaattgtgttttaagactactgggaaaaccatttaaaggaatcctgt

SEQ ID NO: 105822 - DNA, 80 bp, synthetic construct
  source 1..80: mol_type = other DNA
cattggagaactgggggaatatgtaatacttgtgcagaaatgttttgattcatgtactcagaagatgggatctggatgac

SEQ ID NO: 105823 - DNA, 80 bp, synthetic construct; identical to SEQ ID NO: 20462
  source 1..80: mol_type = other DNA

SEQ ID NO: 105824 - DNA, 80 bp, synthetic construct
  source 1..80: mol_type = other DNA
gaaaccccatctctactaaaaatacaaaattagccgggcatggtgccacatgcctgtaatcccagctacttgggaggctg

SEQ ID NO: 105825 - DNA, 80 bp, synthetic construct
  source 1..80: mol_type = other DNA
ttgtgctgagttgaagaattcagacatcaaaagccacatatcacatgattccattcccatgcagtatccccataggcaaa

SEQ ID NO: 105826 - DNA, 80 bp, synthetic construct
  source 1..80: mol_type = other DNA
atacacattaaaatggctaacatggtagatttttgctgcatgtattaatatattaatgtattaataaatgtattaattac

SEQ ID NO: 105827 - DNA, 80 bp, synthetic construct; identical to SEQ ID NO: 20463
  source 1..80: mol_type = other DNA

SEQ ID NO: 105828 - DNA, 80 bp, synthetic construct
  source 1..80: mol_type = other DNA
gggttttggctcctttatgtctttgggtatgttctgggtcactgaggatcagctctattccacctggcattttgtgcttt

SEQ ID NO: 105829 - DNA, 80 bp, synthetic construct
  source 1..80: mol_type = other DNA
aacaattcctgttgtgctactcgctttgggcagttagcgaaagggactaattgtgtgcaaatacatacgtttggtgtttg

SEQ ID NO: 105830 - DNA, 80 bp, synthetic construct
  source 1..80: mol_type = other DNA
ccctgttggccccagcacagggtaaatgaaactgtagcttatagtaatatttacgtatgggagtcaatgagctgtttaaa

SEQ ID NO: 105831 - DNA, 80 bp, synthetic construct
  source 1..80: mol_type = other DNA
cactggaacaggctgagctgtaattgaattaaatatctgtgtaatccctaggagaagctgaataaggtttgaggatcttg

SEQ ID NO: 105832 - DNA, 80 bp, synthetic construct; identical to SEQ ID NO: 20464
  source 1..80: mol_type = other DNA

SEQ ID NO: 105833 - DNA, 80 bp, synthetic construct
  source 1..80: mol_type = other DNA
aatcggattatgaggcacctgatctgtttaaggctgtgtgagtagaaccaggtcctgccttccggaagttcatggttaaa

SEQ ID NO: 105834 - DNA, 80 bp, synthetic construct
  source 1..80: mol_type = other DNA
atgctcgcgtgcatgagtttgtgttgagagaaagaaaaaagccaggagagtaggatgagtcagatttaaccactgttttt

SEQ ID NO: 105835 - DNA, 80 bp, synthetic construct
  source 1..80: mol_type = other DNA
ttcttttgagcagtggagtggatttgtgagtgttcatatctgtcctcatctgtgggaattgtatgtccaaggtgctaatt

SEQ ID NO: 105836 - DNA, 80 bp, synthetic construct; identical to SEQ ID NO: 20465
  source 1..80: mol_type = other DNA

SEQ ID NO: 105837 - DNA, 80 bp, synthetic construct
  source 1..80: mol_type = other DNA
ctgggatgctctcctagactcctctgtacctttcttctttcaaacccaaaacaggtcccatctccttagtcttaactgtc

SEQ ID NO: 105838 - DNA, 80 bp, synthetic construct
  source 1..80: mol_type = other DNA
tgcccaaatttgattgtcaacttcctttgtatggagctgtactgttctttttgttgtttttcttaactccttgcccctgc

SEQ ID NO: 105839 - DNA, 80 bp, synthetic construct; identical to SEQ ID NO: 20466
  source 1..80: mol_type = other DNA

SEQ ID NO: 105840 - DNA, 80 bp, synthetic construct
  source 1..80: mol_type = other DNA
ttcctcagcccagctaccctttccagctgtgactgctggttgtggagctgaatgtgtgtggggtgtgggcctgtgtgtgg

SEQ ID NO: 105841 - DNA, 80 bp, synthetic construct
  source 1..80: mol_type = other DNA
tgccaaactcgttgctggattgccataaacacttacttggattgattagagaggctatttgccgtattgaaggtggcaga

SEQ ID NO: 105842 - DNA, 80 bp, synthetic construct
  source 1..80: mol_type = other DNA
ccctatttttaaaagtgcctgcctctgctggttttgttgtggcagcgctcaaaggcaggaagacagataagatcggattt

SEQ ID NO: 105843 - DNA, 80 bp, synthetic construct
  source 1..80: mol_type = other DNA
cccagttctcatcacagctatagggtgtcactgtatacatcaagtcatggttagccgcaggtttgatcggggaagagaca

SEQ ID NO: 105844 - DNA, 80 bp, synthetic construct; identical to SEQ ID NO: 20467
  source 1..80: mol_type = other DNA

SEQ ID NO: 105845 - DNA, 80 bp, synthetic construct
  source 1..80: mol_type = other DNA
cctcttctcttgacagagacctctgggcctagataaatgtataaactgcattgcaggaatgaagccgtttccattaagaa

SEQ ID NO: 105846 - DNA, 80 bp, synthetic construct
  source 1..80: mol_type = other DNA
tccatctcacctccctgaacaggaggcactgtttgtcaggaggccttgccacctttggccctttctttccaaagaaagat

SEQ ID NO: 105847 - DNA, 80 bp, synthetic construct; identical to SEQ ID NO: 20468
  source 1..80: mol_type = other DNA

SEQ ID NO: 105848 - DNA, 80 bp, synthetic construct
  source 1..80: mol_type = other DNA
ctgagagaattgtggctctagctgtgggcagaaattcatggccttgaagaatggctactgtatataccagtgataaatat

SEQ ID NO: 105849 - DNA, 80 bp, synthetic construct
  source 1..80: mol_type = other DNA
gaagcaacgcagggcctgctaatgcctcctgttgccctaggtcaggccagggcccattgttgacatctgtgctgtgctgc

SEQ ID NO: 105850 - DNA, 80 bp, synthetic construct
  source 1..80: mol_type = other DNA
ttctccctcaccatccaggacatcactgagccctgtcagttctgcccccagaatatctaagttcatccaatgccccattt

SEQ ID NO: 105851 - DNA, 80 bp, synthetic construct
  source 1..80: mol_type = other DNA
ctaagaaatgtacatctgtcatctgtcatatctgctgaaaattgttcagggcttcctgctgccttgagaatgagggtctg

SEQ ID NO: 105852 - DNA, 80 bp, synthetic construct; identical to SEQ ID NO: 20469
  source 1..80: mol_type = other DNA

SEQ ID NO: 105853 - DNA, 80 bp, synthetic construct
  source 1..80: mol_type = other DNA
ttttgttctctgctatgctcaggacccagatcaaaggagctcagtaactatttacaggcgtacatcatatgtggaggaca

SEQ ID NO: 105854 - DNA, 80 bp, synthetic construct
  source 1..80: mol_type = other DNA
ctgattacctaattcacacgaaggtgttaatggtggtaatggcatagtatttattaccccaggggacccagaacggtggt

SEQ ID NO: 105855 - DNA, 80 bp, synthetic construct; identical to SEQ ID NO: 20470
  source 1..80: mol_type = other DNA

SEQ ID NO: 105856 - DNA, 80 bp, synthetic construct
  source 1..80: mol_type = other DNA
aaggaaaccaagagagaagtagctttatctgggtggaggggagtgggcctttcagagcctcgaaatcttcccacctgctg

SEQ ID NO: 105857 - DNA, 80 bp, synthetic construct
  source 1..80: mol_type = other DNA
gaagtccgtcattcggctgcgagtaatttctgatgggagaggggcttcccccggcccttcccgcctctctgagccttgcc

SEQ ID NO: 105858 - DNA, 80 bp, synthetic construct
  source 1..80: mol_type = other DNA
agaggaggagccatttgattttgactattgttgaaattgagtggggaattttgggtttgttttaggttttggaagggagg

SEQ ID NO: 105859 - DNA, 80 bp, synthetic construct
  source 1..80: mol_type = other DNA
gggtgatctttctaaaggacagatcttgcttcagcacctccctggttagaacccttccgtccagtggttcctagtgcttc

SEQ ID NO: 105860 - DNA, 80 bp, synthetic construct; identical to SEQ ID NO: 20471
  source 1..80: mol_type = other DNA

SEQ ID NO: 105861 - DNA, 80 bp, synthetic construct
  source 1..80: mol_type = other DNA
actgcaaatgtgtccccccagctgctgagcatgcctaggtctgacacacaccacgatatgttgaaatcattggtttctgg

SEQ ID NO: 105862 - DNA, 80 bp, synthetic construct
  source 1..80: mol_type = other DNA
ctcgttctaaaacggagcatttggtccttgcagcctgccttgtggtttatgacttagtagattgaaaatgacagttgtgc

SEQ ID NO: 105863 - DNA, 80 bp, synthetic construct; identical to SEQ ID NO: 20472
  source 1..80: mol_type = other DNA

SEQ ID NO: 105864 - DNA, 80 bp, synthetic construct
  source 1..80: mol_type = other DNA
ctttttgtgtggaatgcttgccatgcactgaaaaatgctttgtgatagcagttttgaaaaattgagtcattttgccctga

SEQ ID NO: 105865 - DNA, 80 bp, synthetic construct
  source 1..80: mol_type = other DNA
catgtaagtcttacatcctcctctttggtgattggatactgaccctctccccaggggttcctgcacagagctggaattct

SEQ ID NO: 105866 - DNA, 80 bp, synthetic construct
  source 1..80: mol_type = other DNA
acaaagaaggaaaagcgagagggggaaacacacttaatggacaagggatgagtaaaacccaatggactgagaaaacccca

SEQ ID NO: 105867 - DNA, 80 bp, synthetic construct
  source 1..80: mol_type = other DNA
cggcccacttcccacccacccgggtctccagataacatgaagccatagctcccaggctcgtcagcgggggaaaccaactc

SEQ ID NO: 105868 - DNA, 80 bp, synthetic construct; identical to SEQ ID NO: 20473
  source 1..80: mol_type = other DNA

SEQ ID NO: 105869 - DNA, 80 bp, synthetic construct
  source 1..80: mol_type = other DNA
ccccagcctgtagcgggatatgtcagaagatttggatttagaggaacttgggtttgacaaaatagaagtgtatgtatata

SEQ ID NO: 105870 - DNA, 80 bp, synthetic construct
  source 1..80: mol_type = other DNA
aggagcgttccttgccgtgcagatgcaaatgctcattgttacttgttctgcctctctgtgtctgtgacatccagccctgt

SEQ ID NO: 105871 - DNA, 80 bp, synthetic construct; identical to SEQ ID NO: 20474
  source 1..80: mol_type = other DNA

SEQ ID NO: 105872 - DNA, 80 bp, synthetic construct
  source 1..80: mol_type = other DNA
aattcatacaccataaatctgctcttttaagggatatgatttagtggtttttagtgtattaatggagttgtacaaccatc

SEQ ID NO: 105873 - DNA, 80 bp, synthetic construct
  source 1..80: mol_type = other DNA
aatttgtggacttttgtgtttgacttctttcacttaacatattttcagggttcatccatttgtagcatgtgtcagtactt

SEQ ID NO: 105874 - DNA, 80 bp, synthetic construct
  source 1..80: mol_type = other DNA
ttttcatttatcttgagtagatacctagaagtagaattatggggtcatttggtagctttgtttacctttttgagaaactg

SEQ ID NO: 105875 - DNA, 80 bp, synthetic construct; identical to SEQ ID NO: 20475
  source 1..80: mol_type = other DNA

SEQ ID NO: 105876 - DNA, 80 bp, synthetic construct
  source 1..80: mol_type = other DNA
tttttagtagagacagggtttcaccatgatggccaggttggtcttgaactcctgacctcagatgatccacctgcctcagc

SEQ ID NO: 105877 - DNA, 80 bp, synthetic construct
  source 1..80: mol_type = other DNA
gcaatggcgccatctcagctcactgcaacctccgccacctaggttcaagcaattctcctgccttagcctcccaagtagct

SEQ ID NO: 105878 - DNA, 80 bp, synthetic construct
  source 1..80: mol_type = other DNA
gagccaccacacccggctagccatttctaattgggttgtctttctactgttgaattataagagttccttatatattctgg

SEQ ID NO: 105879 - DNA, 80 bp, synthetic construct; identical to SEQ ID NO: 20476
  source 1..80: mol_type = other DNA

SEQ ID NO: 105880 - DNA, 80 bp, synthetic construct
  source 1..80: mol_type = other DNA
ttctttttggactcttaagattctcttttattgatccatacatctatcctcatgacagtcttgactactatagctttgta

SEQ ID NO: 105881 - DNA, 80 bp, synthetic construct
  source 1..80: mol_type = other DNA
cagcctcccgagtagctgggactacaggcgcctgccaccacgcccggccaattttttttttgtatttttagtagagacga

SEQ ID NO: 105882 - DNA, 80 bp, synthetic construct
  source 1..80: mol_type = other DNA
tctcagaaatccaataattacaatagtaaatacaagtaaagatagacaaggaaattaggggagaagacaagaaaatagga

SEQ ID NO: 105883 - DNA, 80 bp, synthetic construct; identical to SEQ ID NO: 20477
  source 1..80: mol_type = other DNA

SEQ ID NO: 105884 - DNA, 80 bp, synthetic construct
  source 1..80: mol_type = other DNA
ttttcaaattgggaatgtttattacattctttggcagcatttctgccaccaggttgaggttagttgggaccaatttggcg

SEQ ID NO: 105885 - DNA, 80 bp, synthetic construct
  source 1..80: mol_type = other DNA
ctcagcgctggagggtcctctctctcgcccactccctctgacatgcctctgagactgcctgcccgatggaaatatccagc

SEQ ID NO: 105886 - DNA, 80 bp, synthetic construct
  source 1..80: mol_type = other DNA
acatgtcatattgggtggacctcttcgtcccacacccaataaagggctttaccatttttcagtagcatcctttcttaaga

SEQ ID NO: 105887 - DNA, 80 bp, synthetic construct; identical to SEQ ID NO: 20478
  source 1..80: mol_type = other DNA

SEQ ID NO: 105888 - DNA, 80 bp, synthetic construct
  source 1..80: mol_type = other DNA
atgttgttactgcctgtggcttttcacacctcctgtctcaaatattggagcttttttggctacagccctgtgatgaaggc

SEQ ID NO: 105889 - DNA, 80 bp, synthetic construct
  source 1..80: mol_type = other DNA
caatctttgaattcctggaactcatgccatgagcacttccaggagcaccttagtgcttcattacaaagatgatgagacgt

SEQ ID NO: 105890 - DNA, 80 bp, synthetic construct
  source 1..80: mol_type = other DNA
aatgtgatgccaagcaaacagaaaagttgttttggctccatctctgaggtcatttagttgctatttccatctactttgaa

SEQ ID NO: 105891 - DNA, 80 bp, synthetic construct; identical to SEQ ID NO: 20479
  source 1..80: mol_type = other DNA

SEQ ID NO: 105892 - DNA, 80 bp, synthetic construct
  source 1..80: mol_type = other DNA
ttcccccaaggaaaagacataggagccaagaccaaagggtgggtaggagtaatcagaagagcatgtctctcatctctgga

SEQ ID NO: 105893 - DNA, 80 bp, synthetic construct
  source 1..80: mol_type = other DNA
aacatctcctgttcagtttatctcagctggcctttgctgagcaccagttagttgccttgtgcatccttgggtgatggatt

SEQ ID NO: 105894 - DNA, 80 bp, synthetic construct
  source 1..80: mol_type = other DNA
ggatatactggacacgttgtcctaggatgcagattcctaccaggccttcaaggcttgtagaaatcttccctaaaactgat

SEQ ID NO: 105895 - DNA, 80 bp, synthetic construct; identical to SEQ ID NO: 20480
  source 1..80: mol_type = other DNA

SEQ ID NO: 105896 - DNA, 80 bp, synthetic construct
  source 1..80: mol_type = other DNA
tcagccattgggaaaccagctaaccagctttctgcttgatggttgtagtaaaatcccatgattagtgacaatggcatgcc

SEQ ID NO: 105897 - DNA, 80 bp, synthetic construct
  source 1..80: mol_type = other DNA
aatgcaatgtttatcttgaaagaagttgtcaactacttggaaatccccaagcttacttcctccaggaagccattctggac

SEQ ID NO: 105898 - DNA, 80 bp, synthetic construct
  source 1..80: mol_type = other DNA
agaaagagtaataatcctttttgaatgcacagcatttacagaggcctcacaggctgaaaatggtaattaggatacacaat

SEQ ID NO: 105899 - DNA, 80 bp, synthetic construct
  source 1..80: mol_type = other DNA
gtagaagagagctgtttgtcagaaccagcagtggcttcagatcttgaaagtccaactccttcattttacagaggaggaaa

SEQ ID NO: 105900 - DNA, 80 bp, synthetic construct; identical to SEQ ID NO: 20481
  source 1..80: mol_type = other DNA

SEQ ID NO: 105901 - DNA, 80 bp, synthetic construct
  source 1..80: mol_type = other DNA
gcactttgggaggccgaggcgggtggatcacctgaggtcaggagttcaagaccagcctggccaacgtggcaaaaccccgt

SEQ ID NO: 105902 - DNA, 80 bp, synthetic construct
  source 1..80: mol_type = other DNA
caatgtctcaaaaaataaaaaagagagagtctgaaattcattctttcaacatgcttgtgttgggtgctgcctggcacagc

SEQ ID NO: 105903 - DNA, 80 bp, synthetic construct
  source 1..80: mol_type = other DNA
gagaaggctaggtggcataagtaaagatatggatagcgctttcctcttcagagtgtttattaccagggttagataaagca

SEQ ID NO: 105904 - DNA, 80 bp, synthetic construct; identical to SEQ ID NO: 20482
  source 1..80: mol_type = other DNA

SEQ ID NO: 105905 - DNA, 80 bp, synthetic construct
  source 1..80: mol_type = other DNA
tgtgatgtgggtgtcctgagtcgtgaacatcccattgtgcaggataaaatgctggtttctgagctgtctttcaagacaca

SEQ ID NO: 105906 - DNA, 80 bp, synthetic construct
  source 1..80: mol_type = other DNA
cccctgttgtacctagcacagaatcatgcacaagcaggtgcttgttaactgttggtgtgtaccaacaaacatttacggag

SEQ ID NO: 105907 - DNA, 80 bp, synthetic construct; identical to SEQ ID NO: 20483
  source 1..80: mol_type = other DNA

SEQ ID NO: 105908 - DNA, 80 bp, synthetic construct
  source 1..80: mol_type = other DNA
ttgcagggaggcccatagtcaatgggaggtgggcagtagacacagagagctgggttattcttgccacacagctgtgctgg

SEQ ID NO: 105909 - DNA, 80 bp, synthetic construct
  source 1..80: mol_type = other DNA
tgccaaagacattcataaaattcagacccgcacacactcgggaatgggaaaaatgaattattttgtaagaagcttatagt

SEQ ID NO: 105910 - DNA, 80 bp, synthetic construct
  source 1..80: mol_type = other DNA
ctggagtgcagtggtgcgatcacagctcactgcagccttgacctcccaggctcaagcaatcctcctgcctcagcccctca

SEQ ID NO: 105911 - DNA, 80 bp, synthetic construct
  source 1..80: mol_type = other DNA
cactgtccctggccaagactctgggtttagtaagcctcttgcaactcactaggagtggatttctaggacctccccacttt

SEQ ID NO: 105912 - DNA, 80 bp, synthetic construct; identical to SEQ ID NO: 20484
  source 1..80: mol_type = other DNA

SEQ ID NO: 105913 - DNA, 80 bp, synthetic construct
  source 1..80: mol_type = other DNA
agaagggcagatgggctagctgcgaggagggcagaggcactgtgcaatggtgttgcctgggaacactccgtggagagtgt

SEQ ID NO: 105914 - DNA, 80 bp, synthetic construct
  source 1..80: mol_type = other DNA
ctttgaatgcagcccaacacaaattcataaactttctgaaaacattgtaagattttttttttgcgattattttttagctc

SEQ ID NO: 105915 - DNA, 80 bp, synthetic construct; identical to SEQ ID NO: 20485
  source 1..80: mol_type = other DNA

SEQ ID NO: 105916 - DNA, 80 bp, synthetic construct
  source 1..80: mol_type = other DNA
gacgcaggctggctgccagcgggtgccggtgggcactcctgacacaggccactgccagccggccttgtgggtcctgaggg

SEQ ID NO: 105917 - DNA, 80 bp, synthetic construct
  source 1..80: mol_type = other DNA
agagagcttgctcttggggcagtttgtactgggcgtttagggttataaaaacctagatttgctgaaaacggctctctttt

SEQ ID NO: 105918 - DNA, 80 bp, synthetic construct
  source 1..80: mol_type = other DNA
gtatgtgcttgtcagcttctagtgcctccatttcttgatatgaggaaattttgcttaaaaaaaaatctctactgatagga

SEQ ID NO: 105919 - DNA, 80 bp, synthetic construct; identical to SEQ ID NO: 20486
  source 1..80: mol_type = other DNA

SEQ ID NO: 105920 - DNA, 80 bp, synthetic construct
  source 1..80: mol_type = other DNA
ccctttccttcttagaaaagagaaattgatctgtaggcttcagggactcttcagttagcctgggggtactgtgcgggtca

SEQ ID NO: 105921 - DNA, 80 bp, synthetic construct
  source 1..80: mol_type = other DNA
ttgggttttttggccatttgttagagccaaaagaggtcacaggaaatgatatactagtttcattgcccaaaatactgagg

SEQ ID NO: 105922 - DNA, 80 bp, synthetic construct
  source 1..80: mol_type = other DNA
aaggataggtttttttcacagagcaatgatgttccctgtggtccctatgtagggtggtaaggaatagggctttgggatcc

SEQ ID NO: 105923 - DNA, 80 bp, synthetic construct
  source 1..80: mol_type = other DNA
tgcctgtaatcccagtactttgggaggctgaggtgggaggatcgcttgaggccagaagtttgagaccagactggccagca

SEQ ID NO: 105924 - DNA, 80 bp, synthetic construct; identical to SEQ ID NO: 20487
  source 1..80: mol_type = other DNA

SEQ ID NO: 105925 - DNA, 80 bp, synthetic construct
  source 1..80: mol_type = other DNA
gcaggagaatcgcttgaacccaggaggaggagtttgcagtgagccaagattgtgccatcgcactccagcttgggcaacaa

SEQ ID NO: 105926 - DNA, 80 bp, synthetic construct
  source 1..80: mol_type = other DNA
agtacataggaggcactcagatagacgggatgccccaaaattgggagacggacaaacttattttgaaatagtcttttttt

SEQ ID NO: 105927 - DNA, 80 bp, synthetic construct; identical to SEQ ID NO: 20488
  source 1..80: mol_type = other DNA

SEQ ID NO: 105928 - DNA, 80 bp, synthetic construct
  source 1..80: mol_type = other DNA
gactacagaagcaggccaccacgtctggctaatttttgtatttttctgttgagaagaggtcttgctatcatgggcaggct

SEQ ID NO: 105929 - DNA, 80 bp, synthetic construct
  source 1..80: mol_type = other DNA
tctgcagtttacacagcttgttgatctccacagtgagaattaacttcacaacctgggtccaagaggctggaggattgtca

SEQ ID NO: 105930 - DNA, 80 bp, synthetic construct
  source 1..80: mol_type = other DNA
tcattaccacgtcacacagctgaccaaggcctcatctgagactgtgtttgaatagaaattaaacagggctgacagtgaag

SEQ ID NO: 105931 - DNA, 80 bp, synthetic construct; identical to SEQ ID NO: 20489
  source 1..80: mol_type = other DNA

SEQ ID NO: 105932 - DNA, 80 bp, synthetic construct
  source 1..80: mol_type = other DNA
ggagggagtcatgggaagcagttgtgttgaatggctacaggccctggtggctgggtgcatccccgtatgccatccaggcc

SEQ ID NO: 105933 - DNA, 80 bp, synthetic construct
  source 1..80: mol_type = other DNA
ctttgaagcgctgttgcctttctgtggctagatccacgatcttctctctgggatcaccccataggacatttgctttccac

SEQ ID NO: 105934 - DNA, 80 bp, synthetic construct
  source 1..80: mol_type = other DNA
ttattgggccttttcactttaatagcttaacagagacatctgtgatggcttgcatccagagtgcgtggtgtttatttttg

SEQ ID NO: 105935 - DNA, 80 bp, synthetic construct
  source 1..80: mol_type = other DNA
gaagcgcactgaccataagagcaacatgtgggcaagagccgcggcactggggtaatttattgccgccgctcgcttcacca

SEQ ID NO: 105936 - DNA, 80 bp, synthetic construct; identical to SEQ ID NO: 20490
  source 1..80: mol_type = other DNA

SEQ ID NO: 105937 - DNA, 80 bp, synthetic construct
  source 1..80: mol_type = other DNA
tgattgctcacaattgcctcctgagtggtggggccatgctggggcactgtgcccagactctagacttccaggggtccggg

SEQ ID NO: 105938 - DNA, 80 bp, synthetic construct
  source 1..80: mol_type = other DNA
ctgaccctgctccaacttccccctcagacattaaacctgtaccacccactgagatggttttgattttctattctgcgttt

SEQ ID NO: 105939 - DNA, 80 bp, synthetic construct
  source 1..80: mol_type = other DNA
gctgggagagctccgacagtagagtctggcaggtctggttcaagcatccctttggtgtaacatggtgtgaatggtggggc

SEQ ID NO: 105940 - DNA, 80 bp, synthetic construct; identical to SEQ ID NO: 20491
  source 1..80: mol_type = other DNA

SEQ ID NO: 105941 - DNA, 80 bp, synthetic construct
  source 1..80: mol_type = other DNA
aatggataagtaaatatttaccctgtctgaggtcgaatgtgaactgtctaccaggtgttttgtttttctgtctcctccct

SEQ ID NO: 105942 - DNA, 80 bp, synthetic construct
  source 1..80: mol_type = other DNA
catcctgccctttccctcctctgagccgcaccctgcagacggccctctacctgtgaatccatacaggatgtaggcaaagg

SEQ ID NO: 105943 - DNA, 80 bp, synthetic construct
  source 1..80: mol_type = other DNA
agactttttgaaattgattggttggtttgtacatccatttattcaccccacccctcatcctactgtacacgcttatggtc

SEQ ID NO: 105944 - DNA, 80 bp, synthetic construct; identical to SEQ ID NO: 20492
  source 1..80: mol_type = other DNA

SEQ ID NO: 105945 - DNA, 80 bp, synthetic construct
  source 1..80: mol_type = other DNA
aagtagagcatctctggggctggagtttttctaagatgtgtaagatttagaggctgtcatactgcaaacagggagagcgg

SEQ ID NO: 105946 - DNA, 80 bp, synthetic construct
  source 1..80: mol_type = other DNA
gaaggattaaaagagctggtgtgtgtaaaacccaggaacatagttcctggtgtatagtgacttataatttcgaaaacctt

SEQ ID NO: 105947 - DNA, 80 bp, synthetic construct; identical to SEQ ID NO: 20493
  source 1..80: mol_type = other DNA

SEQ ID NO: 105948 - DNA, 80 bp, synthetic construct
  source 1..80: mol_type = other DNA
atgtgcaccttgagcacagagtgttgagtgcgtggtggatggatgtcatttgcgttttacagatgcggcaacagaaactc

SEQ ID NO: 105949 - DNA, 80 bp, synthetic construct
  source 1..80: mol_type = other DNA
agcacctcactatgggaaacataaagcaggaactaacaggactcctctctcaagaaggaatttcagtctacttggggaaa

SEQ ID NO: 105950 - DNA, 80 bp, synthetic construct
  source 1..80: mol_type = other DNA
aggtttcagtcagctacagtctggaaataggtgaatatagtacagtcagatgtgttgagagaaagagaccacatttatat

SEQ ID NO: 105951 - DNA, 80 bp, synthetic construct
  source 1..80: mol_type = other DNA
taaattaaactttgtcttgggtgtacatgcacaggaaaaaacacagtgtctatagagtttggtactgtctctggtttcag

SEQ ID NO: 105952 - DNA, 80 bp, synthetic construct; identical to SEQ ID NO: 20494
  source 1..80: mol_type = other DNA

SEQ ID NO: 105953 - DNA, 80 bp, synthetic construct
  source 1..80: mol_type = other DNA
tcttcttcccattaaggaagaagggaaacttgcatttgctgaatgtctactatgtcccaagtgctgtgctagatactcta

SEQ ID NO: 105954 - DNA, 80 bp, synthetic construct
  source 1..80: mol_type = other DNA
ccggtactaggtgccttccactcacctgacctccttctcttacaccaggggtccccaaccccggggccgtggactgatac

SEQ ID NO: 105955 - DNA, 80 bp, synthetic construct; identical to SEQ ID NO: 20495
  source 1..80: mol_type = other DNA

SEQ ID NO: 105956 - DNA, 80 bp, synthetic construct
  source 1..80: mol_type = other DNA
agcagcattctgtctaatcacaggttctgcctgaaaggcagacacttttaacccttcggtggacagggttggtgatagct

SEQ ID NO: 105957 - DNA, 80 bp, synthetic construct
  source 1..80: mol_type = other DNA
ggaggctggaattgagcaagctcttgaatgcatgcatggattcatgcagtcactcactccacaaatattcacgtgctttg

SEQ ID NO: 105958 - DNA, 80 bp, synthetic construct
  source 1..80: mol_type = other DNA
tagtactgaatggaagatatgggacctcagaaccaagaggctttgactcatttgtccctctttctgtctgttttgccatc

SEQ ID NO: 105959 - DNA, 80 bp, synthetic construct; identical to SEQ ID NO: 20496
  source 1..80: mol_type = other DNA

SEQ ID NO: 105960 - DNA, 80 bp, synthetic construct
  source 1..80: mol_type = other DNA
gccactatacctcactgcctctctgtgaccagggttgagtcctggtcctcaaatgaagcccgatttgccagaaccttctt

SEQ ID NO: 105961 - DNA, 80 bp, synthetic construct
  source 1..80: mol_type = other DNA
ggctaagaacactgcattaacaggagatagagatccagtgtgtgtgaaccttgtgaaaacatctctgtctgttcctccaa

SEQ ID NO: 105962 - DNA, 80 bp, synthetic construct
  source 1..80: mol_type = other DNA
gatggtcatctgagacatggaacttcatgataggaaggtgtcttggaggataactagcaagtctttcactttatagaggg

SEQ ID NO: 105963 - DNA, 80 bp, synthetic construct
  source 1..80: mol_type = other DNA
aacctcactgttttgcccatttctgagatggaaaatcaaggaacattgccccatctccaccccgggaatctatatgcccc

SEQ ID NO: 105964 - DNA, 80 bp, synthetic construct; identical to SEQ ID NO: 20497
  source 1..80: mol_type = other DNA

SEQ ID NO: 105965 - DNA, 80 bp, synthetic construct
  source 1..80: mol_type = other DNA
ccgcactccccactcatcactccaaggcagaccattgcattttctttcattctgataaactccttgagttgaacagaaat

SEQ ID NO: 105966 - DNA, 80 bp, synthetic construct
  source 1..80: mol_type = other DNA
tcctctttaaacacttgtccaaactgtttgtggcccgtcctgtattacgcccagggcagatgcagtagcccagcccaagc

SEQ ID NO: 105967 - DNA, 80 bp, synthetic construct; identical to SEQ ID NO: 20498
  source 1..80: mol_type = other DNA

SEQ ID NO: 105968 - DNA, 80 bp, synthetic construct
  source 1..80: mol_type = other DNA
gaaattaatttacaaagtcattagtattttccatttgtgacccccaaaatgaatgtaggtgtagttccttgcaattaact

SEQ ID NO: 105969 - DNA, 80 bp, synthetic construct
  source 1..80: mol_type = other DNA
tttcaacagtctgaaaagtggcagggacctttggaatgatctgttttaaccttttcattttctgaatgaggcaactgaga

SEQ ID NO: 105970 - DNA, 80 bp, synthetic construct
  source 1..80: mol_type = other DNA
agatattttcacgtttagcaccttcacgtttagcagtactcctcattagaggaaaatgggatgatgtgggcagagtcacc

SEQ ID NO: 105971 - DNA, 80 bp, synthetic construct; identical to SEQ ID NO: 20499
  source 1..80: mol_type = other DNA

SEQ ID NO: 105972 - DNA, 80 bp, synthetic construct
  source 1..80: mol_type = other DNA
cactaagaaaagccactgctgagagttcacagtccttgcttcagtgttgtcttacgctcggggtgccttaaagggcttac

SEQ ID NO: 105973 - DNA, 80 bp, synthetic construct
  source 1..80: mol_type = other DNA
ggatcgagaagaactgtgtttacacggagttgtcaaggatcattctgccaatgataacctattatcgtgcaactctgtgc

SEQ ID NO: 105974 - DNA, 80 bp, synthetic construct
  source 1..80: mol_type = other DNA
tggctgcccttcagcccccagggtcctgctggggagatgtacccagggggtcctgtgctgggagagtggaagcaggggtg

SEQ ID NO: 105975 - DNA, 80 bp, synthetic construct
  source 1..80: mol_type = other DNA
acgtgggtttgtaggggagagagggtgacccccagtgagggtaagaaagataagctccagtgagctcttctcaccctggg

SEQ ID NO: 105976 - DNA, 80 bp, synthetic construct; identical to SEQ ID NO: 20500
  source 1..80: mol_type = other DNA

SEQ ID NO: 105977 - DNA, 80 bp, synthetic construct
  source 1..80: mol_type = other DNA
gttaatacattgctgtgtatactctcaggccaagaatttcctcagtgtttacataccagagcagtactttgaactttgat

SEQ ID NO: 105978 - DNA, 80 bp, synthetic construct
  source 1..80: mol_type = other DNA
ggggtatgtgtgtgtgttttcatcgtattataaaaacgtgaaacatttgaattacgggcaagtggtattctaccagattt

SEQ ID NO: 105979 - DNA, 80 bp, synthetic construct
  source 1..80: mol_type = other DNA
gtgtccttcccagctagaattttgtagtgtattatttgtaaagccaaataaccccactgcaatgtgtttgaaccaccaaa

SEQ ID NO: 105980 - DNA, 80 bp, synthetic construct; identical to SEQ ID NO: 20501
  source 1..80: mol_type = other DNA

SEQ ID NO: 105981 - DNA, 80 bp, synthetic construct
  source 1..80: mol_type = other DNA
ccacacctggctaatttttgtattttttagtagagacagggtttcgccatgttggccaggctggtctcgaactcctgacc

SEQ ID NO: 105982 - DNA, 80 bp, synthetic construct
  source 1..80: mol_type = other DNA
gaaaatttagaacacatggagaagtaaagagtgaaattgctgactgccctattaccccaacctccaccctatagagatat

SEQ ID NO: 105983 - DNA, 80 bp, synthetic construct
  source 1..80: mol_type = other DNA
ctcaatgggcagggctgggcatctcctggtggtctacccaccatgccagttcatcaggctggggtctgacctctttctgg

SEQ ID NO: 105984 - DNA, 80 bp, synthetic construct; identical to SEQ ID NO: 20502
  source 1..80: mol_type = other DNA

SEQ ID NO: 105985 - DNA, 80 bp, synthetic construct
  source 1..80: mol_type = other DNA
tgcttgctgttagtactcatgttagcttctgccattctttccaccattgtcctgggtaaaattttgcatatctgagttgt

SEQ ID NO: 105986 - DNA, 80 bp, synthetic construct
  source 1..80: mol_type = other DNA
ttcaacaaatgtttttggtgggtaattttacctttgttgatcaccagctttgtttggggtgcatcatttctctcaagccg

SEQ ID NO: 105987 - DNA, 80 bp, synthetic construct; identical to SEQ ID NO: 20503
  source 1..80: mol_type = other DNA

SEQ ID NO: 105988 - DNA, 80 bp, synthetic construct
  source 1..80: mol_type = other DNA
cagggttgctggccagagatctgtcagagtttctccgggcttctctttctctgggtggggatgtggactcttaggatgtc

SEQ ID NO: 105989 - DNA, 80 bp, synthetic construct
  source 1..80: mol_type = other DNA
gagggttccagagtgtggggagagcgtgctggggaggggagctatttgttcctttccagtcatcgctgtactgagcggtt

SEQ ID NO: 105990 - DNA, 80 bp, synthetic construct
  source 1..80: mol_type = other DNA
tgggcatttgttccttctttctttcttcctttgatttcttgctgtctccttcaattaggcctgtgactgttttcacatgg

SEQ ID NO: 105991 - DNA, 80 bp, synthetic construct
  source 1..80: mol_type = other DNA
ctggaagatgtgaaaacaccatcccattaaccctccaaagcagttggttgacttgatcagggaagatatgaaatataatt

SEQ ID NO: 105992 - DNA, 80 bp, synthetic construct; identical to SEQ ID NO: 20504
  source 1..80: mol_type = other DNA

SEQ ID NO: 105993 - DNA, 80 bp, synthetic construct
  source 1..80: mol_type = other DNA
ctcacattaggggaaaaaaaataaacctcagatgccccgtgatatctcgttgcgtcaggttttcctataaaatgtcaaga

SEQ ID NO: 105994 - DNA, 80 bp, synthetic construct
  source 1..80: mol_type = other DNA
tttagggttaaatagaaaacttccttaatgactgtggctggaattaaggtgtacttaaagctgtagcagccctggtgggt

SEQ ID NO: 105995 - DNA, 80 bp, synthetic construct; identical to SEQ ID NO: 20505
  source 1..80: mol_type = other DNA

SEQ ID NO: 105996 - DNA, 80 bp, synthetic construct
  source 1..80: mol_type = other DNA
agcctgaccaacatgacgaaaccccgtctctactaaaaaaaaatacagaattagccaggtgtggtggcacatgcctgtaa

SEQ ID NO: 105997 - DNA, 80 bp, synthetic construct
  source 1..80: mol_type = other DNA
agctgtgcttgattaagtgaatgtgtttgatccaagagggcaggggattctggaagagacattaagtacagattgatgag

SEQ ID NO: 105998 - DNA, 80 bp, synthetic construct
  source 1..80: mol_type = other DNA
agagttgagtagagactcctttagctctcttcttttttctaacttctctttattccaccgttctctctttacttctgcct

SEQ ID NO: 105999 - DNA, 80 bp, synthetic construct; identical to SEQ ID NO: 20506
  source 1..80: mol_type = other DNA

SEQ ID NO: 106000 - DNA, 80 bp, synthetic construct
  source 1..80: mol_type = other DNA
cacagggacagacagagtgtgggaaatggggccaggtgtaaggaaacggagcagaacttggggttcattcatagtctaaa

SEQ ID NO: 106001 - DNA, 80 bp, synthetic construct
  source 1..80: mol_type = other DNA
caaccatttaaaaattttaaaaacgctctgcaggccaagcacaacatctgtgggcagtgggcagctgcctgtttttgacc

SEQ ID NO: 106002 - DNA, 80 bp, synthetic construct
  source 1..80: mol_type = other DNA
attgagcacctgttatgttcaacgtactatctgtgttgtgccatgtttcctagtctacattttgggatgagctgtgtctt

SEQ ID NO: 106003 - DNA, 80 bp, synthetic construct
  source 1..80: mol_type = other DNA
gcttaacccagcagtagtccccaggatgagacagtcttcagctgaggaaagccctggggatttggaagctagagcagaga

SEQ ID NO: 106004 - DNA, 80 bp, synthetic construct; identical to SEQ ID NO: 20507
  source 1..80: mol_type = other DNA

SEQ ID NO: 106005 - DNA, 80 bp, synthetic construct
  source 1..80: mol_type = other DNA
attctcctgctctccgaatttaaattagggtcaatcatacaaacctcacaggcttgttcagtcaacaaaggcacagagag

SEQ ID NO: 106006 - DNA, 80 bp, synthetic construct
  source 1..80: mol_type = other DNA
cccccaccattgtttctagaactgtcagtgttcaaatgtttaatagctaggttttttttttcccccgtacacttggccag

SEQ ID NO: 106007 - DNA, 80 bp, synthetic construct
  source 1..80: mol_type = other DNA
tcaggaatggcgaaactctatttttcaccttgttaatgctgctcccacctttgtttctcccctagtgtcagtcttaagtg

SEQ ID NO: 106008 - DNA, 80 bp, synthetic construct; identical to SEQ ID NO: 20508
  source 1..80: mol_type = other DNA

SEQ ID NO: 106009 - DNA, 80 bp, synthetic construct
  source 1..80: mol_type = other DNA
tgggttggaacatcctcctcattttctctggcatgtccttttgctcaatgaatcattcccggccaggccagacgtccttg

SEQ ID NO: 106010 - DNA, 80 bp, synthetic construct
  source 1..80: mol_type = other DNA
gcatgtcagccagaatggtacttttcaagtcattcagtaatggatctgtatgattattttttgcacaaagaactaaatag

SEQ ID NO: 106011 - DNA, 80 bp, synthetic construct; identical to SEQ ID NO: 20509
  source 1..80: mol_type = other DNA

SEQ ID NO: 106012 - DNA, 80 bp, synthetic construct
  source 1..80: mol_type = other DNA
ttttgtctttttagtagaaaccattttcaccatgttgaccaggctggtcttgaactcctggcctcaagtgatccacccac

SEQ ID NO: 106013 - DNA, 80 bp, synthetic construct
  source 1..80: mol_type = other DNA
atctgcaacctccgcctcctgggttcacatgattctcctgcctcagcctcctgagtagctgggagtacagcctgctttgg

SEQ ID NO: 106014 - DNA, 80 bp, synthetic construct
  source 1..80: mol_type = other DNA
agtcaagataatgaacatgtccatcactcctctaaaactttcctcctgcctctttgcaatttcaccatcttgtttgcctg

SEQ ID NO: 106015 - DNA, 80 bp, synthetic construct
  source 1..80: mol_type = other DNA
tttagtagtgactttttgtggttgggtgatatttctttttgtggatataaagggagggttgttgatcttcagggattatt

SEQ ID NO: 106016 - DNA, 80 bp, synthetic construct; identical to SEQ ID NO: 20510
  source 1..80: mol_type = other DNA

SEQ ID NO: 106017 - DNA, 80 bp, synthetic construct
  source 1..80: mol_type = other DNA
tgatagagctgccgtgttcttagacacaaagacagctgttatgctgtctttgcaaaaatgttgaggtcttgctttccaca

SEQ ID NO: 106018 - DNA, 80 bp, synthetic construct
  source 1..80: mol_type = other DNA
ttctctgattcctgctcagaggattgcgtgatgggggctggagtgcaggcaggaagttagccttgtggattccctcatcc

SEQ ID NO: 106019 - DNA, 80 bp, synthetic construct; identical to SEQ ID NO: 20511
  source 1..80: mol_type = other DNA

SEQ ID NO: 106020 - DNA, 80 bp, synthetic construct
  source 1..80: mol_type = other DNA
caaaatttgatagacctgggaaagagattgttaatctctcattctgtgctcaaggatgctgtgccatttaaaaaacaaaa

SEQ ID NO: 106021 - DNA, 80 bp, synthetic construct
  source 1..80: mol_type = other DNA
tcgtgaatgaaaggttatgggtgacactgtatgtcagtgtggcgcttaccggtttatgaagggcctacatgtgcaatctc

SEQ ID NO: 106022 - DNA, 80 bp, synthetic construct
  source 1..80: mol_type = other DNA
tgcaaggcggctggggcacgcagaacaacagcttgacacagtgggaagaagctgggctttaatgtttagagttcagagtt

SEQ ID NO: 106023 - DNA, 80 bp, synthetic construct; identical to SEQ ID NO: 20512
  source 1..80: mol_type = other DNA

SEQ ID NO: 106024 - DNA, 80 bp, synthetic construct
  source 1..80: mol_type = other DNA
ggatgatcaactgctctttggaggagcagagagtatgcctacacatcatttgaataaaatgtgacagcctgccagagacc

SEQ ID NO: 106025 - DNA, 80 bp, synthetic construct
  source 1..80: mol_type = other DNA
tggggagcggggagggacttctctcagacacttatatggaatctcaggtcatacagagacattgtctctgtgttttatat

SEQ ID NO: 106026 - DNA, 80 bp, synthetic construct
  source 1..80: mol_type = other DNA
ctccatttctccctcctgcttaatccaaggagcagagaacaccagggaaactcggaagtagcggggttgatttgggagct

SEQ ID NO: 106027 - DNA, 80 bp, synthetic construct; identical to SEQ ID NO: 20513
  source 1..80: mol_type = other DNA

SEQ ID NO: 106028 - DNA, 80 bp, synthetic construct
  source 1..80: mol_type = other DNA
ggctgcagtggactgtggccccaacagctgggtgtgtgcagggtgggaaatgccaggcacagccgctcctccacagaaac

SEQ ID NO: 106029 - DNA, 80 bp, synthetic construct
  source 1..80: mol_type = other DNA
cctggagtagaaaaaaaacaacataggagctcactcagaaggatccctgggtaaatgccatcctttcctgggccccagtt

SEQ ID NO: 106030 - DNA, 80 bp, synthetic construct
  source 1..80: mol_type = other DNA
ccacagatgtgagcatgtctggaacctgtctacctgtctcattcattccatgacctctgatttttgaggtcagtaattct

SEQ ID NO: 106031 - DNA, 80 bp, synthetic construct; identical to SEQ ID NO: 20514
  source 1..80: mol_type = other DNA

SEQ ID NO: 106032 - DNA, 80 bp, synthetic construct
  source 1..80: mol_type = other DNA
tttcacaggtatttggaatgctagaaggtactagaaggtgagaagacactagagatccgttgaacccatcattttttaaa

SEQ ID NO: 106033 - DNA, 80 bp, synthetic construct
  source 1..80: mol_type = other DNA
ataaaaatctccagttaacaaatatttgttgagcaagtttattgcaaatcgctgtatttaatgtctgcctacaaccttag

SEQ ID NO: 106034 - DNA, 80 bp, synthetic construct
  source 1..80: mol_type = other DNA
ttcccctgctgtttttaattgcacctctcaagaccagctgattgcttaaagaacatttctggtattgggcccatggcagt

SEQ ID NO: 106035 - DNA, 80 bp, synthetic construct
  source 1..80: mol_type = other DNA
ttgcttatttcctacgtcttctgaaaggtactatgaagcttaccagttgctgatgcacgctatcagctaataattccatt

SEQ ID NO: 106036 - DNA, 80 bp, synthetic construct; identical to SEQ ID NO: 20515
  source 1..80: mol_type = other DNA

SEQ ID NO: 106037 - DNA, 80 bp, synthetic construct
  source 1..80: mol_type = other DNA
gcaggagcctcacattcagatactgtggctgcaacattttacctccactacttgggcctgttcagcattttgagtttcta

SEQ ID NO: 106038 - DNA, 80 bp, synthetic construct
  source 1..80: mol_type = other DNA
attgtagctgttttagggatgcagctttcagacaagggccacttagttgatgaggccggcttaatcgaggagggctgttg

SEQ ID NO: 106039 - DNA, 80 bp, synthetic construct
  source 1..80: mol_type = other DNA
gaaccagaacctttttttttttaggtacaataggaggtctgtacccttagacagaaaggaatgctaattggccacttaac

SEQ ID NO: 106040 - DNA, 80 bp, synthetic construct; identical to SEQ ID NO: 20516
  source 1..80: mol_type = other DNA

SEQ ID NO: 106041 - DNA, 80 bp, synthetic construct
  source 1..80: mol_type = other DNA
agaagagactgagttgtaaatgtcataagactgagatggttgtaaatgtcccaaccatactgtgtgacatttgctaggaa

SEQ ID NO: 106042 - DNA, 80 bp, synthetic construct
  source 1..80: mol_type = other DNA
ctctagccggtgactcataattaaggaagtcaaaactgtgcaattaacacaaaacctcctcatttgccctcttcacctct

SEQ ID NO: 106043 - DNA, 80 bp, synthetic construct
  source 1..80: mol_type = other DNA
agaaagaaagaaagaaagtaaatcccacccccaagcgtgcagtctgcccacaggaagtgattcatggtgctccgattcgg

SEQ ID NO: 106044 - DNA, 80 bp, synthetic construct; identical to SEQ ID NO: 20517
  source 1..80: mol_type = other DNA

SEQ ID NO: 106045 - DNA, 80 bp, synthetic construct
  source 1..80: mol_type = other DNA
tcggctcactgcaacctccacctcccaggttcaagtgattctcttgcctcagcctccccagtagctgggattacaggtgc

SEQ ID NO: 106046 - DNA, 80 bp, synthetic construct
  source 1..80: mol_type = other DNA
atctcagtcttaagacattcatatattagtggaaggcccagatttgtgtttcagttctaccttgccacctctaagcctgt

SEQ ID NO: 106047 - DNA, 80 bp, synthetic construct
  source 1..80: mol_type = other DNA
gctcactgcaacctccacctcctgggttcaagcgattctcctgcctcagcctcctgagtagctgggactacaggcttgcg

SEQ ID NO: 106048 - DNA, 80 bp, synthetic construct; identical to SEQ ID NO: 20518
  source 1..80: mol_type = other DNA

SEQ ID NO: 106049 - DNA, 80 bp, synthetic construct
  source 1..80: mol_type = other DNA
gttactatataagcattcaatattctcctatttgaaactatgtaatatatgattatacatagtaacaatcatatattaca

SEQ ID NO: 106050 - DNA, 80 bp, synthetic construct
  source 1..80: mol_type = other DNA
ttctccccatccctctgttccctttacacttttcagcctctagtatcttctattctgtttttacaaagttagagttttgg

SEQ ID NO: 106051 - DNA, 80 bp, synthetic construct
  source 1..80: mol_type = other DNA
caatgcaaattaatttgattccccaaagtagtttggaaacagagaagactctaagtgttggctacatgaacaggcctgct

SEQ ID NO: 106052 - DNA, 80 bp, synthetic construct; identical to SEQ ID NO: 20519
  source 1..80: mol_type = other DNA

SEQ ID NO: 106053 - DNA, 80 bp, synthetic construct
  source 1..80: mol_type = other DNA
acttgaaagttctatgatcctgctgacactcaagaaaaagcaatccccatcaacttggtgcttggagaaaaaagtttgtg

SEQ ID NO: 106054 - DNA, 80 bp, synthetic construct
  source 1..80: mol_type = other DNA
tctgctgatttaaacccagtgtgctttgtagtcatagagaactgagtttggagtgtaacatctaggttcaagcccaggca

SEQ ID NO: 106055 - DNA, 80 bp, synthetic construct; identical to SEQ ID NO: 20520
  source 1..80: mol_type = other DNA

SEQ ID NO: 106056 - DNA, 80 bp, synthetic construct
  source 1..80: mol_type = other DNA
atgcctgtaatcccagctacgcagaaggctgaggcaggagaatcacctgaactggaggttgcagtgagccaagatcactc

SEQ ID NO: 106057 - DNA, 80 bp, synthetic construct
  source 1..80: mol_type = other DNA
atttggcaatgtttagaggtattttttttcagttgtcacagctgcaggtgggtcacagctaccggcatccagtgtgaggg

SEQ ID NO: 106058 - DNA, 80 bp, synthetic construct
  source 1..80: mol_type = other DNA
atccatagcctgatgttgaaaagttcttggtgtctgcgtgctttacagataattatcatcaggctgaactttctccagta

SEQ ID NO: 106059 - DNA, 80 bp, synthetic construct
  source 1..80: mol_type = other DNA
ggataaggcaaggtgtttcttggcttccccctccaaggatctgcccaggagccttctgcaacctctgtggctcctgccca

SEQ ID NO: 106060 - DNA, 80 bp, synthetic construct; identical to SEQ ID NO: 20521
  source 1..80: mol_type = other DNA

SEQ ID NO: 106061 - DNA, 80 bp, synthetic construct
  source 1..80: mol_type = other DNA
tggaacattcaaaaacatgcttagcacacttacagaacttgttgggaacactcaggaaactcagctacaggcagagcaca

SEQ ID NO: 106062 - DNA, 80 bp, synthetic construct
  source 1..80: mol_type = other DNA
aaatgccagggtgtagtatattcagtgtacatcctgagttctgtttgtaactctttgattccaagcttcagaaaattaca

SEQ ID NO: 106063 - DNA, 80 bp, synthetic construct; identical to SEQ ID NO: 20522
  source 1..80: mol_type = other DNA

SEQ ID NO: 106064 - DNA, 80 bp, synthetic construct
  source 1..80: mol_type = other DNA
aaccccaaaatgaagggattggaccagatgccctcaaggttcctcaagggtcagctgtcacagttctccaaagtgagttt

SEQ ID NO: 106065 - DNA, 80 bp, synthetic construct
  source 1..80: mol_type = other DNA
accaaagggaataagtgaacccccaaatcaaacatccctcttggcagatggtgttttcagggctttcttatttgttcctt

SEQ ID NO: 106066 - DNA, 80 bp, synthetic construct
  source 1..80: mol_type = other DNA
aatttttttctgccttcccagaaggtccgatggaatgagcacttcacccaaacttgaagtcactcaagtcttgcttttat

SEQ ID NO: 106067 - DNA, 80 bp, synthetic construct
  source 1..80: mol_type = other DNA
ttgatcacaggtcaggagttcaagaccagcctggccaacacggtgaaaccccatctctactaaaaatacaaaaatttagc

SEQ ID NO: 106068 - DNA, 80 bp, synthetic construct; identical to SEQ ID NO: 20523
  source 1..80: mol_type = other DNA

SEQ ID NO: 106069 - DNA, 80 bp, synthetic construct
  source 1..80: mol_type = other DNA
gaataaatggaggtgaaatgtatgccgtaggtttggtttttgagttattaatgtgctacttggggctacttcaaaaaatg

SEQ ID NO: 106070 - DNA, 80 bp, synthetic construct
  source 1..80: mol_type = other DNA
ggtatgccccatttagaattagggaaaagaatctgagtcatgcagcctagcttcactttatattaactctgggaaaagtt

SEQ ID NO: 106071 - DNA, 80 bp, synthetic construct
  source 1..80: mol_type = other DNA
gtaacaaagcactctaaaaacccagcagcttaaatccattgtttatgctcactcatgcttctgtggtggcttacctgggc

SEQ ID NO: 106072 - DNA, 80 bp, synthetic construct; identical to SEQ ID NO: 20524
  source 1..80: mol_type = other DNA

SEQ ID NO: 106073 - DNA, 80 bp, synthetic construct
  source 1..80: mol_type = other DNA
agtcacttccacctctgttgttactattactactcaatgggcaagttgaaaaagaaagtttgtctgaaagtgactagaaa

SEQ ID NO: 106074 - DNA, 80 bp, synthetic construct
  source 1..80: mol_type = other DNA
tggtcacttttaataatggtgatgcagcatgggatgacagaaaaagcgctgttcatccaacctgcccctatctcccatgt

SEQ ID NO: 106075 - DNA, 80 bp, synthetic construct
  source 1..80: mol_type = other DNA
aatggatcttggcatgtttctggaacttatgtgctgtgctcctcaccttctccccagcctctgtgttgtcccacagatgg

SEQ ID NO: 106076 - DNA, 80 bp, synthetic construct
  source 1..80: mol_type = other DNA
gggaggaaacctaatttcctgccacaggaaattgttctgctagggaagaatatatttaaggattaaaaccttctgtcaga

SEQ ID NO: 106077 - DNA, 80 bp, synthetic construct; identical to SEQ ID NO: 20525
  source 1..80: mol_type = other DNA

SEQ ID NO: 106078 - DNA, 80 bp, synthetic construct
  source 1..80: mol_type = other DNA
atattaaatccagcagctgaaactcccaattcactcttattactttggtaaggattgctacatattttgagtggggcaga

SEQ ID NO: 106079 - DNA, 80 bp, synthetic construct
  source 1..80: mol_type = other DNA
tggcacagagaagcaggggcatggtccagatgacttttagaaaatactgccaagccagactggcggtcgtgtgctcacaa

SEQ ID NO: 106080 - DNA, 80 bp, synthetic construct; identical to SEQ ID NO: 20526
  source 1..80: mol_type = other DNA

SEQ ID NO: 106081 - DNA, 80 bp, synthetic construct
  source 1..80: mol_type = other DNA
tcatagtaagcaggcagtaatagttacatgacaatactgacaatagattcctgccactttctggaatatctttctgggta

SEQ ID NO: 106082 - DNA, 80 bp, synthetic construct
  source 1..80: mol_type = other DNA
tgctctggtgcaatcacagctcactgcagcctcaacctgctgggttcaagcaatcctcccatctcagcctcccgagttgc

SEQ ID NO: 106083 - DNA, 80 bp, synthetic construct
  source 1..80: mol_type = other DNA
gtccagtcagtgttttagatgaaaaatattaagaccaagacactaagtgatttttttcaactttgtacagttagcaagta

SEQ ID NO: 106084 - DNA, 80 bp, synthetic construct; identical to SEQ ID NO: 20527
  source 1..80: mol_type = other DNA

SEQ ID NO: 106085 - DNA, 80 bp, synthetic construct
  source 1..80: mol_type = other DNA
tttcacgcagcatcattaatttagattcattcatagcgttgcatgtatcagtagttgatccttttttgttactgagttgt

SEQ ID NO: 106086 - DNA, 80 bp, synthetic construct; identical to SEQ ID NO: 20528
  source 1..80: mol_type = other DNA

SEQ ID NO: 106087 - DNA, 80 bp, synthetic construct
  source 1..80: mol_type = other DNA
tccacatccttgccaatacatggcatgatcaggctttttaattgtagccattctaataagtatgtagtcctatctcattg

SEQ ID NO: 106088 - DNA, 80 bp, synthetic construct
  source 1..80: mol_type = other DNA
agtactttgggaggccgaggcaggcggatcacgaggtcaggagttcgagaccatcctggttaacacatgaaaccccgtct

SEQ ID NO: 106089 - DNA, 80 bp, synthetic construct
  source 1..80: mol_type = other DNA
gttgtgccactgcactccagcctgggcgacagagcgagactccatctcaaaaaaaaaaaaaaaaaaaaaaaaaaaaaaaa

SEQ ID NO: 106090 - DNA, 80 bp, synthetic construct; identical to SEQ ID NO: 20529
  source 1..80: mol_type = other DNA

SEQ ID NO: 106091 - DNA, 80 bp, synthetic construct
  source 1..80: mol_type = other DNA
tctttggacctttgttgaagccagtcgtccatatatatgtaactatttctggactctgttaggttccattgatccgtttg

SEQ ID NO: 106092 - DNA, 80 bp, synthetic construct
  source 1..80: mol_type = other DNA
attctcccccgctgctggcatgagcttttctccaaggccttctcttgcagaggaggctatgatgtccagctggccctttt

SEQ ID NO: 106093 - DNA, 80 bp, synthetic construct; identical to SEQ ID NO: 20530
  source 1..80: mol_type = other DNA

SEQ ID NO: 106094 - DNA, 80 bp, synthetic construct
  source 1..80: mol_type = other DNA
agtcctccttttatacctcagggacgagtcccaggctgtcttctcgatctgcctggtaattactgtttttcagctgtagg

SEQ ID NO: 106095 - DNA, 80 bp, synthetic construct
  source 1..80: mol_type = other DNA
ctctgtttctctctttggttggtgctgttggtggcatctggccagcccttccttcacagagtgcccatgaattctctgta

SEQ ID NO: 106096 - DNA, 80 bp, synthetic construct
  source 1..80: mol_type = other DNA
gtacctgtgactcatgagcatccatctcatctgctccccacttctatccctgctacccgcaatctgttggtcacacgtag

SEQ ID NO: 106097 - DNA, 80 bp, synthetic construct; identical to SEQ ID NO: 20531
  source 1..80: mol_type = other DNA

SEQ ID NO: 106098 - DNA, 80 bp, synthetic construct
  source 1..80: mol_type = other DNA
actcttggggttccttgttattttcgttcaggacactttcattgtgtgtaattgtaggtttctgtgatgatgatgatgat

SEQ ID NO: 106099 - DNA, 80 bp, synthetic construct
  source 1..80: mol_type = other DNA
gccaccatgcctggctgatttttgtacttttagtagagacagggtttcaccatgttggccaggctggttttgaactcctg

SEQ ID NO: 106100 - DNA, 80 bp, synthetic construct
  source 1..80: mol_type = other DNA
tgtcacacataataggtgctcattaaatatgtgttaaataagggactccattttagtggcacctcctcacctgtctaata

SEQ ID NO: 106101 - DNA, 80 bp, synthetic construct; identical to SEQ ID NO: 20532
  source 1..80: mol_type = other DNA

SEQ ID NO: 106102 - DNA, 80 bp, synthetic construct
  source 1..80: mol_type = other DNA
gtcatagctgcttggccaaatcaccatagaagacatggttcacacagggtcatggcactggccaattgtaagtaggcaca

SEQ ID NO: 106103 - DNA, 80 bp, synthetic construct
  source 1..80: mol_type = other DNA
aaaaaaatccctttaatttccgtctttcactccctgctcaccacaaataactaaaaaagaaaggaggggccaggcacggt

SEQ ID NO: 106104 - DNA, 80 bp, synthetic construct
  source 1..80: mol_type = other DNA
tactcaggaggctgaggcgggagaatggcatgaacccgggaggcagagcttgcagtgagccgagatggcgccactacact

SEQ ID NO: 106105 - DNA, 80 bp, synthetic construct; identical to SEQ ID NO: 20533
  source 1..80: mol_type = other DNA

SEQ ID NO: 106106 - DNA, 80 bp, synthetic construct
  source 1..80: mol_type = other DNA
agctgggagtcctcacggggcctttgttgtcttctcctgagatccctcccagcactctcagctagcagtgctctgatctc

SEQ ID NO: 106107 - DNA, 80 bp, synthetic construct
  source 1..80: mol_type = other DNA
catcggaaggggctccctcatgtcatctactgccgcctgtggcgatggccagacctgcacagccaccacgagctacgggc

SEQ ID NO: 106108 - DNA, 80 bp, synthetic construct; identical to SEQ ID NO: 20534
  source 1..80: mol_type = other DNA

SEQ ID NO: 106109 - DNA, 80 bp, synthetic construct
  source 1..80: mol_type = other DNA
caggctggcctgggaggcaggggcagcggtcagccccgacatcagtcctgtggccccaatctctgccccctggccgtccc

SEQ ID NO: 106110 - DNA, 80 bp, synthetic construct
  source 1..80: mol_type = other DNA
tcatttattttggaagcggaaatagcaacactgtttctctcaccgcccttgaggcccggactggtgttcagtcccaatag

SEQ ID NO: 106111 - DNA, 80 bp, synthetic construct
  source 1..80: mol_type = other DNA
tttgccgtcaaagactgcaaatgtttttagaagcccctcatttacatgcaaataacgtgtgaatcaccagcactttcaga

SEQ ID NO: 106112 - DNA, 80 bp, synthetic construct
  source 1..80: mol_type = other DNA
gagcattctaatttggacgtgacgttcatcctgggttagtttactgggctgagattggctacaggcctgtgtgcttgggt

SEQ ID NO: 106113 - DNA, 80 bp, synthetic construct; identical to SEQ ID NO: 20535
  source 1..80: mol_type = other DNA

SEQ ID NO: 106114 - DNA, 80 bp, synthetic construct
  source 1..80: mol_type = other DNA
ctaggagtacacatttcagacttgggagttgatccggtcctgcgtgagcaaaggcagttatgatccaagcgggagtcaga

SEQ ID NO: 106115 - DNA, 80 bp, synthetic construct
  source 1..80: mol_type = other DNA
tccttctgattcccagagaccccaccccctggctacctgagtgaagatggagaaaccagtgaccaccagatgaaccacag

SEQ ID NO: 106116 - DNA, 80 bp, synthetic construct; identical to SEQ ID NO: 20536
  source 1..80: mol_type = other DNA

SEQ ID NO: 106117 - DNA, 80 bp, synthetic construct
  source 1..80: mol_type = other DNA
aggcagagtcatgggggttgggcaggacagcctggtgcattctggggacagtaagagctcagtgtgtctggagtccagag

SEQ ID NO: 106118 - DNA, 80 bp, synthetic construct
  source 1..80: mol_type = other DNA
taagcagggcctgtgccttagtgagatgtcaccagcagcagggtagagagtggccttgatcacctcaagcagtcacatgg

SEQ ID NO: 106119 - DNA, 80 bp, synthetic construct
  source 1..80: mol_type = other DNA
tcatttgttataggaccaaattggctccagaccagcagcttcttgaattgaaccccagctgccacatagaatgtgtactg

SEQ ID NO: 106120 - DNA, 80 bp, synthetic construct
  source 1..80: mol_type = other DNA
cacctttcccagacagagtctccctctgttgcccaggctggcgtgtagtagcgcgatctcagcttactgcaacctctgcc

SEQ ID NO: 106121 - DNA, 80 bp, synthetic construct; identical to SEQ ID NO: 20537
  source 1..80: mol_type = other DNA

SEQ ID NO: 106122 - DNA, 80 bp, synthetic construct
  source 1..80: mol_type = other DNA
ttgcagctattcagtgcaggcgtgggaagcaggccagcggagcagcatgtctccagctgctgtgtttcttcccactctgc

SEQ ID NO: 106123 - DNA, 80 bp, synthetic construct
  source 1..80: mol_type = other DNA
tctgtcccctctcccttcttcctttcttctcattaagtgtgcctgcagggtcctgttgtgaacatgagtgatttatctac

SEQ ID NO: 106124 - DNA, 80 bp, synthetic construct
  source 1..80: mol_type = other DNA
cacgttgttccccatgtcccttcacctacatatgcgcccttttagacttgtgagaaggccccttggacttcctaggtctt

SEQ ID NO: 106125 - DNA, 80 bp, synthetic construct; identical to SEQ ID NO: 20538
  source 1..80: mol_type = other DNA

SEQ ID NO: 106126 - DNA, 80 bp, synthetic construct
  source 1..80: mol_type = other DNA
aagagattcccacaaacagcgcaaggcagcattcacttgaggccagatgctggacccagtctcaggactgatagatttca

SEQ ID NO: 106127 - DNA, 80 bp, synthetic construct
  source 1..80: mol_type = other DNA
agcctccatctcctaggctcaagtaattgtccagcctcagccttcaccacttacggcttatttttttttttttttttttc

SEQ ID NO: 106128 - DNA, 80 bp, synthetic construct; identical to SEQ ID NO: 20539
  source 1..80: mol_type = other DNA

SEQ ID NO: 106129 - DNA, 80 bp, synthetic construct
  source 1..80: mol_type = other DNA
agtgtttgtctggttgctgagttgcagggtttctgaggcaggtttgtgagtttcctgaaattgatctttccagcacctga

SEQ ID NO: 106130 - DNA, 80 bp, synthetic construct
  source 1..80: mol_type = other DNA
aggtggtgtaagctaaagaaaaaatgtgtcacttattctagttgagaatttagcagccctgagctgggagtcttggttag

SEQ ID NO: 106131 - DNA, 80 bp, synthetic construct
  source 1..80: mol_type = other DNA
ttttctttctgctgtgttgggctacccctccttgatatgtaagtgtttagtaacttggctctccaggccaagaatctttt

SEQ ID NO: 106132 - DNA, 80 bp, synthetic construct
  source 1..80: mol_type = other DNA
ctgaaggtaaggctctcccccgacccctaccatcagcccagctcagcccatcaggtttctggttacggtgatgttgaggt

SEQ ID NO: 106133 - DNA, 80 bp, synthetic construct; identical to SEQ ID NO: 20540
  source 1..80: mol_type = other DNA

SEQ ID NO: 106134 - DNA, 80 bp, synthetic construct
  source 1..80: mol_type = other DNA
gccttgccactgagatcatagtgcatatctggtgttttcattctcttttctccttatgttattttgtaaacacgtttccg

SEQ ID NO: 106135 - DNA, 80 bp, synthetic construct
  source 1..80: mol_type = other DNA
taggctttggcatggaacctgccaaagggcttcaaacaaatgaaatatccatttagtttttattgaggggagatttttat

SEQ ID NO: 106136 - DNA, 80 bp, synthetic construct; identical to SEQ ID NO: 20541
  source 1..80: mol_type = other DNA

SEQ ID NO: 106137 - DNA, 80 bp, synthetic construct
  source 1..80: mol_type = other DNA
caaactgaaggctagaagcgaagttaacacttgagaaattaaaggccatgatggtgaacttgactccgggctttcagctt

SEQ ID NO: 106138 - DNA, 80 bp, synthetic construct
  source 1..80: mol_type = other DNA
cagactgaaaggtggtcatttgctgtgaacttccctctagattgtgtagactaggatgaggatgatgggatgtttcttga

SEQ ID NO: 106139 - DNA, 80 bp, synthetic construct
  source 1..80: mol_type = other DNA
ggcctagttgcacctctgctgggaagatgtgaatcgggggcgagtcgcccagtgagtcagggttaggcttctgggtaaga

SEQ ID NO: 106140 - DNA, 80 bp, synthetic construct; identical to SEQ ID NO: 20542
  source 1..80: mol_type = other DNA

SEQ ID NO: 106141 - DNA, 80 bp, synthetic construct
  source 1..80: mol_type = other DNA
cgtttagaccacctgtccccaccttcctcacttggaggaacaaggctcagacaaggcatttgctgacttttacgttggag

SEQ ID NO: 106142 - DNA, 80 bp, synthetic construct
  source 1..80: mol_type = other DNA
tgggatcaataaggcaggaccaaaaatgattctaaaacaagaaggaggtgcagatgaagtactctgagggttcgagggat

SEQ ID NO: 106143 - DNA, 80 bp, synthetic construct
  source 1..80: mol_type = other DNA
catgtccacctgtaatgcgttgtgccaggtgcccagggagaaagtccagaagagggaggaatagtatatgccaaggagga

SEQ ID NO: 106144 - DNA, 80 bp, synthetic construct
  source 1..80: mol_type = other DNA
gtctcaagagggacaaggtgggaaaaggaggctgaaatggcaggtggggcactgggaaaagacccctgagtgtctgctta

SEQ ID NO: 106145 - DNA, 80 bp, synthetic construct; identical to SEQ ID NO: 20543
  source 1..80: mol_type = other DNA

SEQ ID NO: 106146 - DNA, 80 bp, synthetic construct
  source 1..80: mol_type = other DNA
caggaaagcggctggcgctggaggcgcagatttggaaaccatgaacacatgtggcagcctttcccatagcggggcctgag

SEQ ID NO: 106147 - DNA, 80 bp, synthetic construct
  source 1..80: mol_type = other DNA
cttctgtcttaccgccccattacccatccatagatctgactctggaaacaccgatgaagtttggctgaagtcatgccagt

SEQ ID NO: 106148 - DNA, 80 bp, synthetic construct; identical to SEQ ID NO: 20544
  source 1..80: mol_type = other DNA

SEQ ID NO: 106149 - DNA, 80 bp, synthetic construct
  source 1..80: mol_type = other DNA
cctaggaaaaaatggggacatctcaggacatctgattatttcctttaaagagattattatgaaattactgtacaaaaaga

SEQ ID NO: 106150 - DNA, 80 bp, synthetic construct
  source 1..80: mol_type = other DNA
cccaggcaggctctcggagaccctgggacctgggaccgttgtttgcagggcaggagatatgagcaggtgatgttcctgtt

SEQ ID NO: 106151 - DNA, 80 bp, synthetic construct
  source 1..80: mol_type = other DNA
tctgcctggtgagtaagttgttccctgctttaaagtgagatgattagggcggagccatgactgaggaaaataatgtacca

SEQ ID NO: 106152 - DNA, 80 bp, synthetic construct
  source 1..80: mol_type = other DNA
gtggtcgtttgctgtgaattgccctctagattgtgtagactaggatgatgggatgtttcttgagcttggacccaaggcag

SEQ ID NO: 106153 - DNA, 80 bp, synthetic construct; identical to SEQ ID NO: 20545
  source 1..80: mol_type = other DNA

SEQ ID NO: 106154 - DNA, 80 bp, synthetic construct
  source 1..80: mol_type = other DNA
ccggtcttccccacacttgtgaaatcacaggcagggtcttccccacacttgtgaaatcacaggcaggcaacataatgaca

SEQ ID NO: 106155 - DNA, 80 bp, synthetic construct
  source 1..80: mol_type = other DNA
ttggtttggtattttagtccgcagatacataggttggaattagtaccctgggtgctgggacacagctggcgtgggctcac

SEQ ID NO: 106156 - DNA, 80 bp, synthetic construct
  source 1..80: mol_type = other DNA
acccaggcaggactgagaagtggtggatgaggaacatgggaactggagtgtggaatctcctagattgaggaagagctgcc

SEQ ID NO: 106157 - DNA, 80 bp, synthetic construct; identical to SEQ ID NO: 20546
  source 1..80: mol_type = other DNA

SEQ ID NO: 106158 - DNA, 80 bp, synthetic construct
  source 1..80: mol_type = other DNA
tggagctggaggttcctgcgtctccaacacctctgcactgggaggagagattagcacagactcagaaatctggccaggag

SEQ ID NO: 106159 - DNA, 80 bp, synthetic construct
  source 1..80: mol_type = other DNA
atttgttggtaaatccttgaaaccagatcttaatttgcttgcttgcttgatcagttgattgattggtcaggggaggggtt

SEQ ID NO: 106160 - DNA, 80 bp, synthetic construct; identical to SEQ ID NO: 20547
  source 1..80: mol_type = other DNA

SEQ ID NO: 106161 - DNA, 80 bp, synthetic construct
  source 1..80: mol_type = other DNA
agtgattctcctgcctcagcctccagagtagctgggattacaggcacccgtcaccacacccagctaatttttgtattttt

SEQ ID NO: 106162 - DNA, 80 bp, synthetic construct
  source 1..80: mol_type = other DNA
attgaaggcagaacccacaggtggtgaccatactttctggtctgccactcctcttgcacaagttctgggaggaagcagct

SEQ ID NO: 106163 - DNA, 80 bp, synthetic construct
  source 1..80: mol_type = other DNA
cctgcagactttgccactggcctgatttcactgctccctcaaacaagcatcttcttaatgatgtgtcaggttcctagtgt

SEQ ID NO: 106164 - DNA, 80 bp, synthetic construct
  source 1..80: mol_type = other DNA
agcaccatgcgacacaatgggtggcctgccagctttttctttttttgaatggtgggctgggttgccgttcctgggagcct

SEQ ID NO: 106165 - DNA, 80 bp, synthetic construct; identical to SEQ ID NO: 20548
  source 1..80: mol_type = other DNA

SEQ ID NO: 106166 - DNA, 80 bp, synthetic construct
  source 1..80: mol_type = other DNA
acattgtttagaatatagcttatctcattggaatgttgaagcatcaagcaaagccagagccagacgtggctgacgtggct

SEQ ID NO: 106167 - DNA, 80 bp, synthetic construct
  source 1..80: mol_type = other DNA
ggtgatcaagataggaccaggctattttcaagttcacagaatcgggctattatcattgttgttaacaccatgtgctgagt

SEQ ID NO: 106168 - DNA, 80 bp, synthetic construct; identical to SEQ ID NO: 20549
  source 1..80: mol_type = other DNA

SEQ ID NO: 106169 - DNA, 80 bp, synthetic construct
  source 1..80: mol_type = other DNA
tgggtgtgtgtggagtgcaggggtgttactggcctgccccttcgccattcgtgatagtgttctccttgctcttagaaagg

SEQ ID NO: 106170 - DNA, 80 bp, synthetic construct
  source 1..80: mol_type = other DNA
ctagacgttgcctggcatccagtgagcagggttctcaggccagggctgagacgtgggcatggggagcgtctcctgttcct

SEQ ID NO: 106171 - DNA, 80 bp, synthetic construct
  source 1..80: mol_type = other DNA
agggacttcagaggcaggctgaagctttgagatggaagagcgagaatgagcaggggactccctaattcttcagcagatgg

SEQ ID NO: 106172 - DNA, 80 bp, synthetic construct
  source 1..80: mol_type = other DNA
cggccaagggctgagagaatgggcctggagatgctgcagaggcgtgcagtaggagggcacagtgccagggccactgggcc

SEQ ID NO: 106173 - DNA, 80 bp, synthetic construct; identical to SEQ ID NO: 20550
  source 1..80: mol_type = other DNA

SEQ ID NO: 106174 - DNA, 80 bp, synthetic construct
  source 1..80: mol_type = other DNA
agagccaaaatctgaaagcccttttaggggcagggattaatgtgggttactctggggaccttgcaacagaggctgagagg

SEQ ID NO: 106175 - DNA, 80 bp, synthetic construct
  source 1..80: mol_type = other DNA
aataaaaagagaaatcaatggccctttacacacaaggctgatggaatctcctccagacacctgagcatcttgttctggtg

SEQ ID NO: 106176 - DNA, 80 bp, synthetic construct; identical to SEQ ID NO: 20551
  source 1..80: mol_type = other DNA

SEQ ID NO: 106177 - DNA, 80 bp, synthetic construct
  source 1..80: mol_type = other DNA
gagacacatcggtatggggtggctccattccccgcccccccaccctgcccctgccactctatcccacccccagccccagg

SEQ ID NO: 106178 - DNA, 80 bp, synthetic construct
  source 1..80: mol_type = other DNA
cccactcaaagatataatctcagaaaatctggaagccacagaggaaaatagttcatctaagggatcaagaagggaacgtc

SEQ ID NO: 106179 - DNA, 80 bp, synthetic construct
  source 1..80: mol_type = other DNA
tcaagcgattctcctgcctcagcttcccaagtagctgggattacaggcacccaaccaccacgcccagctaatttttgtgt

SEQ ID NO: 106180 - DNA, 80 bp, synthetic construct
  source 1..80: mol_type = other DNA
ggctgaaatcctctaaataaaaatactctgaaagtacagatggataggttgataagtaggcagtcattgttggaagagtg

SEQ ID NO: 106181 - DNA, 80 bp, synthetic construct; identical to SEQ ID NO: 20552
  source 1..80: mol_type = other DNA

SEQ ID NO: 106182 - DNA, 80 bp, synthetic construct
  source 1..80: mol_type = other DNA
tatctcgggctctcacagaagacttcatttgaagagaggattgattctgtagtgaagagaagaaaagtttggaggccatg

SEQ ID NO: 106183 - DNA, 80 bp, synthetic construct
  source 1..80: mol_type = other DNA
ctgttgttcccatttcgctttttgttttttacttcaaaaaagatacttattctgggtggcataccactgtttgattgatt

SEQ ID NO: 106184 - DNA, 80 bp, synthetic construct
  source 1..80: mol_type = other DNA
atatatatatatatatatatatatatatattttttttttttttttttttggagcggggagaccaagtctcgctcttgtct

SEQ ID NO: 106185 - DNA, 80 bp, synthetic construct
  source 1..80: mol_type = other DNA
cacgttggccaggctagtctcgaactcctgacctcaggtgatctgcccgcctcagcctcccaaggtactgggattacagg

SEQ ID NO: 106186 - DNA, 80 bp, synthetic construct; identical to SEQ ID NO: 20553
  source 1..80: mol_type = other DNA

SEQ ID NO: 106187 - DNA, 80 bp, synthetic construct
  source 1..80: mol_type = other DNA
gagctcattgtcagagtttacgcaactgtttgagttgcagagccaatttaaaaataatttctgtccatctggagtggatt

SEQ ID NO: 106188 - DNA, 80 bp, synthetic construct
  source 1..80: mol_type = other DNA
tgaatctctgaatcttggagtgtgaagagaccaaataatagtggggtagtagtagcagtagcagcaagaaaagctgacac

SEQ ID NO: 106189 - DNA, 80 bp, synthetic construct; identical to SEQ ID NO: 20554
  source 1..80: mol_type = other DNA

SEQ ID NO: 106190 - DNA, 80 bp, synthetic construct
  source 1..80: mol_type = other DNA
ggtgaataacttgactgaggcccatgcctactcagtggcaaaggctgtcactgagacctatcctgtgtgcccatctcttg

SEQ ID NO: 106191 - DNA, 80 bp, synthetic construct
  source 1..80: mol_type = other DNA
tgtgagcaaaggcaccctgtccagtctaacctgaatctctgtaggaagaggcgtgcggctctactacatcggaggggagg

SEQ ID NO: 106192 - DNA, 80 bp, synthetic construct
  source 1..80: mol_type = other DNA
atgctggagagagtccacctttctcaccttttctgctcactcatgattgcgttgtcaatctggaggtgattggattaggt

SEQ ID NO: 106193 - DNA, 80 bp, synthetic construct
  source 1..80: mol_type = other DNA
aggcagtatggcttcctttcttcactcattcattgcacaaacagcatgcagggctctgtgccaggtgctgtaggggatga

SEQ ID NO: 106194 - DNA, 80 bp, synthetic construct; identical to SEQ ID NO: 20555
  source 1..80: mol_type = other DNA

SEQ ID NO: 106195 - DNA, 80 bp, synthetic construct
  source 1..80: mol_type = other DNA
gaggccgtggaaggacaccagagagtttgactctagggaactgctgagggttttctgagtgagcctgaaaaatcccacct

SEQ ID NO: 106196 - DNA, 80 bp, synthetic construct
  source 1..80: mol_type = other DNA
gcagccactgtgtaggcagcccacagaacatggcctgtgacagactagtggagcaggtaacctggccaggccattgcctg

SEQ ID NO: 106197 - DNA, 80 bp, synthetic construct; identical to SEQ ID NO: 20556
  source 1..80: mol_type = other DNA

SEQ ID NO: 106198 - DNA, 80 bp, synthetic construct
  source 1..80: mol_type = other DNA
ggagagaatgaagaagaggaagctcagtgacgctcttggccttctgcctcttccattccccggccccacccccatctttt

SEQ ID NO: 106199 - DNA, 80 bp, synthetic construct
  source 1..80: mol_type = other DNA
ctcattcataagcgtcaccccggctcaccttttggctatttccagcatgtgcttttgtctttatttttctggttgacaca

SEQ ID NO: 106200 - DNA, 80 bp, synthetic construct
  source 1..80: mol_type = other DNA
gatctctccttacctcctagccccagcaccaggtgtattcatcagaggagcccaggtggagggtgcactgggccctctgc

SEQ ID NO: 106201 - DNA, 80 bp, synthetic construct
  source 1..80: mol_type = other DNA
tggtccctttgcccaaggaaaggcccccctctccacaccatctccctatttttggaagccctctttgcagacttctccct

SEQ ID NO: 106202 - DNA, 80 bp, synthetic construct; identical to SEQ ID NO: 20557
  source 1..80: mol_type = other DNA

SEQ ID NO: 106203 - DNA, 80 bp, synthetic construct
  source 1..80: mol_type = other DNA
tctaccagttgacccgaatgtgcaccatccgcatgagcttcgtcaaaggctggggagcggagtacaggtcagttatgggt

SEQ ID NO: 106204 - DNA, 80 bp, synthetic construct
  source 1..80: mol_type = other DNA
gatgatgaggaattgcagaacgatgtttgctggcaccgaacagctgtaggcactgtaaacacacgctccatcttatcctc

SEQ ID NO: 106205 - DNA, 80 bp, synthetic construct
  source 1..80: mol_type = other DNA
ctcttggcttcttccttagtctcattttaggcagatggctttaggatgaccctcttcaggaagttaggtcttcagctcat

SEQ ID NO: 106206 - DNA, 80 bp, synthetic construct; identical to SEQ ID NO: 20558
  source 1..80: mol_type = other DNA

SEQ ID NO: 106207 - DNA, 80 bp, synthetic construct
  source 1..80: mol_type = other DNA
gcgtgctaccacgcctggctaattttttgtattttagtagagagggggtttcaccatgttgcccagggtggtctcgaact

SEQ ID NO: 106208 - DNA, 80 bp, synthetic construct
  source 1..80: mol_type = other DNA
ggtctgcttggttgaatctctcaggccatcctgctttgggtttagagaatccagtcccttttctttccactcacggacca

SEQ ID NO: 106209 - DNA, 80 bp, synthetic construct
  source 1..80: mol_type = other DNA
gaatccattttgttttgcagtcatgctgcactcaggccaaacccatttcaatattggccttgggccaccgtttgtaatga

SEQ ID NO: 106210 - DNA, 80 bp, synthetic construct; identical to SEQ ID NO: 20559
  source 1..80: mol_type = other DNA

SEQ ID NO: 106211 - DNA, 80 bp, synthetic construct
  source 1..80: mol_type = other DNA
aatatttaaagatggactgcagtggaaaagagtaaggggatgtccatttgctcttcttataccagactgtagtctggagg

SEQ ID NO: 106212 - DNA, 80 bp, synthetic construct
  source 1..80: mol_type = other DNA
tccaagtgctaggaagaggctctttggtggcagagcctttccctggggacactatcaccacgcgggatgtcctgccagca

SEQ ID NO: 106213 - DNA, 80 bp, synthetic construct
  source 1..80: mol_type = other DNA
aagcagggcccagggcccacacctctcacctccagctggcaccagcgactccagcctcagcagatagcctttgctcagtg

SEQ ID NO: 106214 - DNA, 80 bp, synthetic construct; identical to SEQ ID NO: 20560
  source 1..80: mol_type = other DNA

SEQ ID NO: 106215 - DNA, 80 bp, synthetic construct
  source 1..80: mol_type = other DNA
ccctgcaattgactttacatatttaactctttgccattgactttacatgtttaactctttaaagtcgacttccttccccc

SEQ ID NO: 106216 - DNA, 80 bp, synthetic construct
  source 1..80: mol_type = other DNA
gtcaccaaagcagaaaaagctttctgacttgtgtaaccccctggagattttttaagtcccccaccccacccctttcccta

SEQ ID NO: 106217 - DNA, 80 bp, synthetic construct; identical to SEQ ID NO: 20561
  source 1..80: mol_type = other DNA

SEQ ID NO: 106218 - DNA, 80 bp, synthetic construct
  source 1..80: mol_type = other DNA
cagaacaggtagtattacaccaccggccccctccccccagactctttttttgagtgacagctttctgggatgtcacagtc

SEQ ID NO: 106219 - DNA, 80 bp, synthetic construct
  source 1..80: mol_type = other DNA
ccgccccgccccaccactccagcagaccttgccccttgtgagctggatagacttgggatggggagggagggagttttgtc

SEQ ID NO: 106220 - DNA, 80 bp, synthetic construct
  source 1..80: mol_type = other DNA
gtgcatatgcaatgtatagtgtctattatcacattaatctcaaagagattcgaatgacggtaagtgttctcatgaagcag

SEQ ID NO: 106221 - DNA, 80 bp, synthetic construct; identical to SEQ ID NO: 20562
  source 1..80: mol_type = other DNA

SEQ ID NO: 106222 - DNA, 80 bp, synthetic construct
  source 1..80: mol_type = other DNA
ccaacataggcaaatgaaaagggctattaaaatatttttacacctttgaaaattgcaggcttggtacaaagaggtctgtc

SEQ ID NO: 106223 - DNA, 80 bp, synthetic construct
  source 1..80: mol_type = other DNA
aaattatttcaactggaaaaaagaaaaaagagtcctcttcttttcccagccttttgcagaacacagtagacagaactgcc

SEQ ID NO: 106224 - DNA, 80 bp, synthetic construct
  source 1..80: mol_type = other DNA
ccaggtgaagggaaggaagtgtatatacttttggcaagtcatacagctcaaatgtgatgagatttctgatgttagaggga

SEQ ID NO: 106225 - DNA, 80 bp, synthetic construct
  source 1..80: mol_type = other DNA
ggagcaccttgacagacttgtgtgagtcttctcgaaggagggttgactcagaacccagagacaatacaaaacccctcact

SEQ ID NO: 106226 - DNA, 80 bp, synthetic construct; identical to SEQ ID NO: 20563
  source 1..80: mol_type = other DNA

SEQ ID NO: 106227 - DNA, 80 bp, synthetic construct
  source 1..80: mol_type = other DNA
ggaaaaaaaaagcctatactttggcaggttatgaactttgaatgtgatgaaatgacacgtttggctgcatttggatggtg

SEQ ID NO: 106228 - DNA, 80 bp, synthetic construct
  source 1..80: mol_type = other DNA
aggatgtgtgggattgtaggcaaacccacctgtggcatcactgaaaataaatttgatcatacctaagaggttaggaaatg

SEQ ID NO: 106229 - DNA, 80 bp, synthetic construct; identical to SEQ ID NO: 20564
  source 1..80: mol_type = other DNA

SEQ ID NO: 106230 - DNA, 80 bp, synthetic construct
  source 1..80: mol_type = other DNA
aggagccaacttttattccctttcctctctcccctccccacctcgcttcttcccaatttagtaacttagatgcttccagc

SEQ ID NO: 106231 - DNA, 80 bp, synthetic construct
  source 1..80: mol_type = other DNA
gggcaaggctgctggcagacgtctccattgtccttatgttgtctgtgttgtatttttttttttttattgaccatggtgat

SEQ ID NO: 106232 - DNA, 80 bp, synthetic construct
  source 1..80: mol_type = other DNA
gtgcatggcatgcacgtatgtaagtaatctggggaagaagcaaagatctgtttcattcttagcctcaggcctcatgaggg

SEQ ID NO: 106233 - DNA, 80 bp, synthetic construct
  source 1..80: mol_type = other DNA
cttggctagagttgggagttcccccaaaataaacgtgtccccattttaccagaaccaaacctcaacacagcgaagctgta

SEQ ID NO: 106234 - DNA, 80 bp, synthetic construct; identical to SEQ ID NO: 20565
  source 1..80: mol_type = other DNA

SEQ ID NO: 106235 - DNA, 80 bp, synthetic construct
  source 1..80: mol_type = other DNA
taagaaagttggaaaggtctctcctcccaaggacagtggctggaagagttggggcacagccagttctgaatgttggtgga

SEQ ID NO: 106236 - DNA, 80 bp, synthetic construct
  source 1..80: mol_type = other DNA
agagagatggagccatctatccaagaagccttcactcaccttcactgctgctgttgcaactcggctgttctggactctga

SEQ ID NO: 106237 - DNA, 80 bp, synthetic construct; identical to SEQ ID NO: 20566
  source 1..80: mol_type = other DNA

SEQ ID NO: 106238 - DNA, 80 bp, synthetic construct
  source 1..80: mol_type = other DNA
aaaccagtgtcttgctgagactcttcccgttgctggcttcgaagaggcaagctgccatattgttagcttccctatggaga

SEQ ID NO: 106239 - DNA, 80 bp, synthetic construct
  source 1..80: mol_type = other DNA
agccatgcctggaatcctgactcagagaatctgtaagatcataaatgtttgttgttttaggcttctatatttgtggtgag

SEQ ID NO: 106240 - DNA, 80 bp, synthetic construct
  source 1..80: mol_type = other DNA
gttaccaaatcatgttttgtaatctatcagctgacagatcttccttcagttttgttgacagaaaagatttgaaaactatc

SEQ ID NO: 106241 - DNA, 80 bp, synthetic construct; identical to SEQ ID NO: 20567
  source 1..80: mol_type = other DNA

SEQ ID NO: 106242 - DNA, 80 bp, synthetic construct
  source 1..80: mol_type = other DNA
gcgtacggtgggtgtagagattttctgggcgacgtgacctaagaaatgactttagaactggctaatcattggttttggag

SEQ ID NO: 106243 - DNA, 80 bp, synthetic construct
  source 1..80: mol_type = other DNA
aggtgtgtcgtaggattcgaagttcgcctccagctccgagagtgcgcctacatctcttccaacaaaatccactcacactt

SEQ ID NO: 106244 - DNA, 80 bp, synthetic construct; identical to SEQ ID NO: 20568
  source 1..80: mol_type = other DNA

SEQ ID NO: 106245 - DNA, 80 bp, synthetic construct
  source 1..80: mol_type = other DNA
accactccctcaaacaggccttcgcctccgcccgcgctgaggcccaggcccaggtccagattcagagccgcccgccggct

SEQ ID NO: 106246 - DNA, 80 bp, synthetic construct
  source 1..80: mol_type = other DNA
agttggcagcaacaacacggccctggtcgtcgtcgccgctgcggtaacggagcggtttgggtggcggagcctgcgttcgc

SEQ ID NO: 106247 - DNA, 80 bp, synthetic construct; identical to SEQ ID NO: 20569
  source 1..80: mol_type = other DNA

SEQ ID NO: 106248 - DNA, 80 bp, synthetic construct
  source 1..80: mol_type = other DNA
gcggcggcggcggcggcggctgggagcgcgcggaatcctctgggagggcgaccgcggcggcctgacgagccgggccgggc

SEQ ID NO: 106249 - DNA, 80 bp, synthetic construct
  source 1..80: mol_type = other DNA
cgttgggtcggctggaatgtgttgccttagggtctaagtgaaagttgtaaattgtttgtctaaatttattttctccagcc

SEQ ID NO: 106250 - DNA, 80 bp, synthetic construct
  source 1..80: mol_type = other DNA
attcttagcacctaactgaacccctccttgcccccaataaaacatgcttcctaataaaagacacagctgatcttactgtt

SEQ ID NO: 106251 - DNA, 80 bp, synthetic construct; identical to SEQ ID NO: 20570
  source 1..80: mol_type = other DNA

SEQ ID NO: 106252 - DNA, 80 bp, synthetic construct
  source 1..80: mol_type = other DNA
aacatataatcttagctaatttttgttagtaacctttgacttttgccagaattagcatccttctagtcttagtagcagct

SEQ ID NO: 106253 - DNA, 80 bp, synthetic construct
  source 1..80: mol_type = other DNA
gcagagactagataatatatatttcagttgaaatctaggaagttctaaaatgtaacttttttttaatgctaaggacttac

SEQ ID NO: 106254 - DNA, 80 bp, synthetic construct
  source 1..80: mol_type = other DNA
agatggaccaagcatttgtaattcggagtagctttaggtctaaagacgatggtgaattatgtaggtttaagttgttggaa

SEQ ID NO: 106255 - DNA, 80 bp, synthetic construct
  source 1..80: mol_type = other DNA
taggtcactgccttcattgtaaatcttgagtttagaaaaaaccaaactgcaaatctgtttttcagacttaatgaaaattt

SEQ ID NO: 106256 - DNA, 80 bp, synthetic construct; identical to SEQ ID NO: 20571
  source 1..80: mol_type = other DNA

SEQ ID NO: 106257 - DNA, 80 bp, synthetic construct
  source 1..80: mol_type = other DNA
ggcctctgctagggaggttaaccctacagaatctgtagggttcattatatttaaactgcatatttcggcttgtctaaatt

SEQ ID NO: 106258 - DNA, 80 bp, synthetic construct
  source 1..80: mol_type = other DNA
atatatgtttggatttctcttattttgttgaactagaagactgtgtggttacgccccaaaatttttttttgtcttaaagc

SEQ ID NO: 106259 - DNA, 80 bp, synthetic construct
  source 1..80: mol_type = other DNA
ggctggagtgcagaggcgcgatctccactcactgcaaaccccgccttccgggttcaagcgattctcctgcgtcagcctcc

SEQ ID NO: 106260 - DNA, 80 bp, synthetic construct; identical to SEQ ID NO: 20572
  source 1..80: mol_type = other DNA

SEQ ID NO: 106261 - DNA, 80 bp, synthetic construct
  source 1..80: mol_type = other DNA
aaaatgtgtaattttggtaatgggaaatttgactgaattccagtttctcaggaacaaggtattttaggttgtgtcacctt

SEQ ID NO: 106262 - DNA, 80 bp, synthetic construct
  source 1..80: mol_type = other DNA
acatatgtaaaactaagatggtaggtagtcggattcttacaatttataaggttctcataatctaagccttgatgagttgc

SEQ ID NO: 106263 - DNA, 80 bp, synthetic construct; identical to SEQ ID NO: 20573
  source 1..80: mol_type = other DNA

SEQ ID NO: 106264 - DNA, 80 bp, synthetic construct
  source 1..80: mol_type = other DNA
cccctgcctcagcctcccgagtagctgagattacaggcgtgcgccaccatgccaagctaatttttttgtattattagtag

SEQ ID NO: 106265 - DNA, 80 bp, synthetic construct
  source 1..80: mol_type = other DNA
gagtacagtgctgcaatcatagctcactgcagcctctaccacccaggctcaagcaatcccacttcagctgctgcggtagc

SEQ ID NO: 106266 - DNA, 80 bp, synthetic construct
  source 1..80: mol_type = other DNA
ccacgcctggcaagtagttttcaatcttggctgtacttttagatcccttgaggagctttacaaaatactgatacctgaat

SEQ ID NO: 106267 - DNA, 80 bp, synthetic construct; identical to SEQ ID NO: 20574
  source 1..80: mol_type = other DNA

SEQ ID NO: 106268 - DNA, 80 bp, synthetic construct
  source 1..80: mol_type = other DNA
gtatattctcaaatgcttacttgtactccttttggagactaattactttaagtccccaagttagcatctgaactccctgt

SEQ ID NO: 106269 - DNA, 80 bp, synthetic construct
  source 1..80: mol_type = other DNA
ttgtcttcttagggcgttaatctacttggtaaaccttacattttcaagcccccaattaactagtcacttaactggtttct

SEQ ID NO: 106270 - DNA, 80 bp, synthetic construct
  source 1..80: mol_type = other DNA
tccatttacatcacctgaagtagttcccaagtgctgggctatggagtagtttcatctctgtctctggaagagctatttaa

SEQ ID NO: 106271 - DNA, 80 bp, synthetic construct; identical to SEQ ID NO: 20575
  source 1..80: mol_type = other DNA

SEQ ID NO: 106272 - DNA, 80 bp, synthetic construct
  source 1..80: mol_type = other DNA
ccaggctagccaaatcttatttatgatttaaaactaggaatgctaccgaatatatatttttatagtaaggtattatttct

SEQ ID NO: 106273 - DNA, 80 bp, synthetic construct
  source 1..80: mol_type = other DNA
ctagtgaaaggatgaccggaaataatatttaatggggtaagctaagccaggaatcattgtacataaacacattaggtgtg

SEQ ID NO: 106274 - DNA, 80 bp, synthetic construct
  source 1..80: mol_type = other DNA
agtaaagattgtagactagatcaatgctttgtaaaactaacagtacctcagacttccagagtgttttttaaaggtacagc

SEQ ID NO: 106275 - DNA, 80 bp, synthetic construct
  source 1..80: mol_type = other DNA
ttgggaggccaaggggggtgcggattacctgaggtcaggagtttgagaccagcctgaccaacatggtgaaaccccgtctc

SEQ ID NO: 106276 - DNA, 80 bp, synthetic construct; identical to SEQ ID NO: 20576
  source 1..80: mol_type = other DNA

SEQ ID NO: 106277 - DNA, 80 bp, synthetic construct
  source 1..80: mol_type = other DNA
atttgtatgggtggtgaaggagcagtggtgggtaaactgctggcactttaaaatgactctaggcagttataccaaacata

SEQ ID NO: 106278 - DNA, 80 bp, synthetic construct
  source 1..80: mol_type = other DNA
atgcataaagcatttctgcacattgaagtacagtgttcttttctaggaaaagcacttgtgttattgagctgcaagctgaa

SEQ ID NO: 106279 - DNA, 80 bp, synthetic construct
  source 1..80: mol_type = other DNA
ctggccacttcgaggagaacatttatagccagtgctaaaatctgatgtttcaagtgaaaatcagatttttgggaaactcc

SEQ ID NO: 106280 - DNA, 80 bp, synthetic construct; identical to SEQ ID NO: 20577
  source 1..80: mol_type = other DNA

SEQ ID NO: 106281 - DNA, 80 bp, synthetic construct
  source 1..80: mol_type = other DNA
caatattttcccaaatgaccaattcatgttacaaaatcgtgcatgggtaggcgatccgttcaaagtacaacatagacaaa

SEQ ID NO: 106282 - DNA, 80 bp, synthetic construct
  source 1..80: mol_type = other DNA
tttctgagaaggctgttaaaatactcctctcttccaattagctgtccatgtgagacacgttttcttcatgtactttaaac

SEQ ID NO: 106283 - DNA, 80 bp, synthetic construct; identical to SEQ ID NO: 20578
  source 1..80: mol_type = other DNA

SEQ ID NO: 106284 - DNA, 80 bp, synthetic construct
  source 1..80: mol_type = other DNA
tggtgtctttaataatgaagagtataaataaaggtccaacttggccaacatgacgaaaccctttctctactaaacataca

SEQ ID NO: 106285 - DNA, 80 bp, synthetic construct
  source 1..80: mol_type = other DNA
gaatatgaataaagggatcctgagatcagagagtttgacagctgctgttttaaagtaactatttctatgcattatcgact

SEQ ID NO: 106286 - DNA, 80 bp, synthetic construct
  source 1..80: mol_type = other DNA
cctcagattgctatatccagggtttcaagcagcatcaccaggactcttgactttgctttctttctgtttctcaggtagtt

SEQ ID NO: 106287 - DNA, 80 bp, synthetic construct; identical to SEQ ID NO: 20579
  source 1..80: mol_type = other DNA

SEQ ID NO: 106288 - DNA, 80 bp, synthetic construct
  source 1..80: mol_type = other DNA
attcatcttaaaagttaaaaaaaaactttttgttgcttttattgctgtataaatgtgctcttggaagttcgccaactgcc

SEQ ID NO: 106289 - DNA, 80 bp, synthetic construct
  source 1..80: mol_type = other DNA
cctagtaataacattgatatattaccaggcccagcttttttctcctcccctagttaaatttaagcacttttgcgccgggc

SEQ ID NO: 106290 - DNA, 80 bp, synthetic construct
  source 1..80: mol_type = other DNA
ctggggaggctgaggcaggagaatcgcttgaacccaggaggcagaagtggcagtgagccaagatggcaccactgcactcc

SEQ ID NO: 106291 - DNA, 80 bp, synthetic construct
  source 1..80: mol_type = other DNA
aaactaacatctgagaaaaaatgtcaacactccttacctaaaatacatgaatttacatgagaacctctctctggccagta

SEQ ID NO: 106292 - DNA, 80 bp, synthetic construct; identical to SEQ ID NO: 20580
  source 1..80: mol_type = other DNA

SEQ ID NO: 106293 - DNA, 80 bp, synthetic construct
  source 1..80: mol_type = other DNA
ccttcatatttcagttggttaaagactccagtcttttctacctagaaatagctcactgatttccccctcccctccttggc

SEQ ID NO: 106294 - DNA, 80 bp, synthetic construct
  source 1..80: mol_type = other DNA
tctagacaaagctcttatccgtctctgcttttcctcatcattttccttcagcctggcaaattcttattcgtatgtggtaa

SEQ ID NO: 106295 - DNA, 80 bp, synthetic construct
  source 1..80: mol_type = other DNA
gttgtccagtgcattgcagggtatttagcagcaaccatggcctttagccaccagatgcccagtagtatccagttgtgacc

SEQ ID NO: 106296 - DNA, 80 bp, synthetic construct; identical to SEQ ID NO: 20581
  source 1..80: mol_type = other DNA

SEQ ID NO: 106297 - DNA, 80 bp, synthetic construct
  source 1..80: mol_type = other DNA
catagactagccaatcctgactgatacgttgtgccaagacctaggttacctatgaactttccatgctccctcatttatag

SEQ ID NO: 106298 - DNA, 80 bp, synthetic construct
  source 1..80: mol_type = other DNA
catcctgcaatgtgagagacagcgaataattatcttgcatcccacaagactttcagatgccccagaaattcatgtaggag

SEQ ID NO: 106299 - DNA, 80 bp, synthetic construct
  source 1..80: mol_type = other DNA
ttttctttctttttccttcctccctccctgcctccctcccttacttcaggctctgttacccaggctggagtgcagtggcg

SEQ ID NO: 106300 - DNA, 80 bp, synthetic construct; identical to SEQ ID NO: 20582
  source 1..80: mol_type = other DNA

SEQ ID NO: 106301 - DNA, 80 bp, synthetic construct
  source 1..80: mol_type = other DNA
cattttcttagttcaagttgtttaagagttcaccatttgggaaaatccatgttactgactgcagtgccattgtgctattt

SEQ ID NO: 106302 - DNA, 80 bp, synthetic construct
  source 1..80: mol_type = other DNA
catgcctgagtatttataggtggaagtacacattatatattaagcttttcctcctttttgttatagttagggcattgtta

SEQ ID NO: 106303 - DNA, 80 bp, synthetic construct; identical to SEQ ID NO: 20583
  source 1..80: mol_type = other DNA

SEQ ID NO: 106304 - DNA, 80 bp, synthetic construct
  source 1..80: mol_type = other DNA
atattatgctcttgcctaccatacttccataatctagaaccatttaatgtaggaatacatctctttattcctgctagtat

SEQ ID NO: 106305 - DNA, 80 bp, synthetic construct
  source 1..80: mol_type = other DNA
aggccccagcatagcataaattttagaaatgatgacatttgatggtgagattgtggtgaaatagttaacacttaaacatt

SEQ ID NO: 106306 - DNA, 80 bp, synthetic construct
  source 1..80: mol_type = other DNA
atggtgctgggaatttctaaaatgagagtgttgttgctgttttcttggatttctaatttgtggcaacaatgtgagacaga

SEQ ID NO: 106307 - DNA, 80 bp, synthetic construct
  source 1..80: mol_type = other DNA
gggtgcagtggcacaatcataactcacagcagccttcaactcctgagctcaagcagtcctcctgcctcagcctcctgagg

SEQ ID NO: 106308 - DNA, 80 bp, synthetic construct; identical to SEQ ID NO: 20584
  source 1..80: mol_type = other DNA

SEQ ID NO: 106309 - DNA, 80 bp, synthetic construct
  source 1..80: mol_type = other DNA
tcaacagtagcttttttactgaacactatgtatcagacacgttatgcagaatttttcctttgagcttctgtataccctcc

SEQ ID NO: 106310 - DNA, 80 bp, synthetic construct
  source 1..80: mol_type = other DNA
atatgaaaaactgcttctctgcatggggtttatgagttgagacagacatttatgtgaaagagataacaacagagggagga

SEQ ID NO: 106311 - DNA, 80 bp, synthetic construct; identical to SEQ ID NO: 20585
  source 1..80: mol_type = other DNA

SEQ ID NO: 106312 - DNA, 80 bp, synthetic construct
  source 1..80: mol_type = other DNA
tctttattcttaagctaatggccttttcctattctctgtggggtcttgggatcagataagttagttttctacctgttgaa

SEQ ID NO: 106313 - DNA, 80 bp, synthetic construct
  source 1..80: mol_type = other DNA
caaccatcaccattatcaatttttaggactttttcattataacaaagaaacaccatacccattagcagtcattcctcatt

SEQ ID NO: 106314 - DNA, 80 bp, synthetic construct
  source 1..80: mol_type = other DNA
ttgttagtactttattcttttttatggttgaataatatttcgttgtatggaattttatctatgcattcatcagttgatgg

SEQ ID NO: 106315 - DNA, 80 bp, synthetic construct; identical to SEQ ID NO: 20586
  source 1..80: mol_type = other DNA

SEQ ID NO: 106316 - DNA, 80 bp, synthetic construct
  source 1..80: mol_type = other DNA
ggggtttttttttttttttaattggtctcttttaacaaaggtgagtgttaactgctaggtagaatttcataccaggcgat

SEQ ID NO: 106317 - DNA, 80 bp, synthetic construct
  source 1..80: mol_type = other DNA
gctggtaagattttcctttagggtgactagtaaagtcagtaagacttgattgagcatgccactatcataatgagaagacc

SEQ ID NO: 106318 - DNA, 80 bp, synthetic construct
  source 1..80: mol_type = other DNA
cagagcaatttcatcttttcccaagtagtcagatctacttcgtaaaatgtgttctgatgtgtgtcttttttttttttctt

SEQ ID NO: 106319 - DNA, 80 bp, synthetic construct; identical to SEQ ID NO: 20587
  source 1..80: mol_type = other DNA

SEQ ID NO: 106320 - DNA, 80 bp, synthetic construct
  source 1..80: mol_type = other DNA
aacattggatgggaggcttcaggttagtcttataagagtttttctataccctctatggtggcagatttaaaaacttgcta

SEQ ID NO: 106321 - DNA, 80 bp, synthetic construct
  source 1..80: mol_type = other DNA
agaaaatttggaaaataaaaataaaaagcagaaaacccacacttcgcaagaactacctttagcactttggtattcatttt

SEQ ID NO: 106322 - DNA, 80 bp, synthetic construct
  source 1..80: mol_type = other DNA
aagtgcaaccatgcctggctaatttttgtatttttagtagagatggggtttcaccatgttggtcaggctggtcttgaacc

SEQ ID NO: 106323 - DNA, 80 bp, synthetic construct; identical to SEQ ID NO: 20588
  source 1..80: mol_type = other DNA

SEQ ID NO: 106324 - DNA, 80 bp, synthetic construct
  source 1..80: mol_type = other DNA
tgcagccttgacctactgggcttatgcagttctcctgccttagcctcctgagtagctaggactacaggcacataccacca

SEQ ID NO: 106325 - DNA, 80 bp, synthetic construct
  source 1..80: mol_type = other DNA
aaacctgagcacaggccttgaaattataccaaggtttaaattctaggtctgatgtatgacatggccaagttagttattgt

SEQ ID NO: 106326 - DNA, 80 bp, synthetic construct
  source 1..80: mol_type = other DNA
aaagtgtcttgcataatgtgacacatgaataaatggtcgtttatttttctaggtggctggtcggaaaggatttcctcatg

SEQ ID NO: 106327 - DNA, 80 bp, synthetic construct; identical to SEQ ID NO: 20589
  source 1..80: mol_type = other DNA

SEQ ID NO: 106328 - DNA, 80 bp, synthetic construct
  source 1..80: mol_type = other DNA
tgcccctttagaacattgtttttgagaaataagatggaaagcattataaatttgaatacttagttatgtattgttagata

SEQ ID NO: 106329 - DNA, 80 bp, synthetic construct
  source 1..80: mol_type = other DNA
gcagagtaatggtaggtaatctgtttcttactactttctctttgttttgtcctatcctctctgtttttttgttgacctag

SEQ ID NO: 106330 - DNA, 80 bp, synthetic construct
  source 1..80: mol_type = other DNA
tactgtaaaaaaatatgatagaggaatgcaccaaaaacaaatataaagaatattttttgagttaagacctatttttgaag

SEQ ID NO: 106331 - DNA, 80 bp, synthetic construct; identical to SEQ ID NO: 20590
  source 1..80: mol_type = other DNA

SEQ ID NO: 106332 - DNA, 80 bp, synthetic construct
  source 1..80: mol_type = other DNA
tctgttacttagaacttaataaactaaaatttctgtaagaactaattaatttgcagagaaactcttataaagaaccactg

SEQ ID NO: 106333 - DNA, 80 bp, synthetic construct
  source 1..80: mol_type = other DNA
ctgtaatcccagctactcaggaggctgaggcaggagaatcgcttgaacccgggaggtggaggttgcagtgagctgagatc

SEQ ID NO: 106334 - DNA, 80 bp, synthetic construct
  source 1..80: mol_type = other DNA
acagtgaaaccccgtctctactaaaaacatacaaaattagccggacgtggtggtgggtgcctgtagtcccagctacttgg

SEQ ID NO: 106335 - DNA, 80 bp, synthetic construct; identical to SEQ ID NO: 20591
  source 1..80: mol_type = other DNA

SEQ ID NO: 106336 - DNA, 80 bp, synthetic construct
  source 1..80: mol_type = other DNA
tgggaagggttgctttaagattggtgaaaactctgcttctttgctacgcagacattgatattgtatcacttctttttttt

SEQ ID NO: 106337 - DNA, 80 bp, synthetic construct
  source 1..80: mol_type = other DNA
atcacacacctcccctattctaaaattattgatgcactgttattgatgggattgtacgggttgatagcctttctatagtg

SEQ ID NO: 106338 - DNA, 80 bp, synthetic construct
  source 1..80: mol_type = other DNA
aatgggacagttccttcatttttgagttaaagtcttgtggtaatcatttccagcctatcttttacctttcatgaaacttt

SEQ ID NO: 106339 - DNA, 80 bp, synthetic construct; identical to SEQ ID NO: 20592
  source 1..80: mol_type = other DNA

SEQ ID NO: 106340 - DNA, 80 bp, synthetic construct
  source 1..80: mol_type = other DNA
ccgccaccatgcccagcatttttttttgtttgtatttttagtagagatggggtttcaccatgttggccggctggtctcga

SEQ ID NO: 106341 - DNA, 80 bp, synthetic construct
  source 1..80: mol_type = other DNA
ctcgtgtgtcaggtcagactgagctaaatgatttctgagtattgtgtcatcattctcatgatacttctacatgggaggtg

SEQ ID NO: 106342 - DNA, 80 bp, synthetic construct
  source 1..80: mol_type = other DNA
agggatatttgttttgtttatggatatatcccaagtactagaacagtacctggaacagaagtgctcaagaaatatttttt

SEQ ID NO: 106343 - DNA, 80 bp, synthetic construct; identical to SEQ ID NO: 20593
  source 1..80: mol_type = other DNA

SEQ ID NO: 106344 - DNA, 80 bp, synthetic construct
  source 1..80: mol_type = other DNA
tatgatcatagtgtacaatagtgctttgtaacttgctttgattctcttggcaaaaatatattgcagacttctatccttgt

SEQ ID NO: 106345 - DNA, 80 bp, synthetic construct
  source 1..80: mol_type = other DNA
agttggtacataaagatgttatgattgctgattaaactgaagagtcatctgaaaagcaaaagcagtgagtaccaagttga

SEQ ID NO: 106346 - DNA, 80 bp, synthetic construct
  source 1..80: mol_type = other DNA
gaagaaaatcattgaactttgttgaagggtgtaatataaggctgaataagtgtagacataccaattttgtgccccaaaca

SEQ ID NO: 106347 - DNA, 80 bp, synthetic construct
  source 1..80: mol_type = other DNA
cagaatatcatcttcatgacttttgatgcatgaacatacttcttaagaggtttttaagaggttgtacatagaaacttgca

SEQ ID NO: 106348 - DNA, 80 bp, synthetic construct; identical to SEQ ID NO: 20594
  source 1..80: mol_type = other DNA

SEQ ID NO: 106349 - DNA, 80 bp, synthetic construct
  source 1..80: mol_type = other DNA
ttggttaatggaaagatgttatgctgtatcagctggaatctagctttgcttatgaaggtgtaatcacataggtgaaagat

SEQ ID NO: 106350 - DNA, 80 bp, synthetic construct
  source 1..80: mol_type = other DNA
tatgttgcttaacaataattctagatcctgggattggatatctatcagatcccactcatatctccacagtgtgaaattaa

SEQ ID NO: 106351 - DNA, 80 bp, synthetic construct; identical to SEQ ID NO: 20595
  source 1..80: mol_type = other DNA

SEQ ID NO: 106352 - DNA, 80 bp, synthetic construct
  source 1..80: mol_type = other DNA
ttaaaatatgtttaattttctatatagctccatcaagtatgatggtgaaggatgaatatgtgcatgactttgagggacag

SEQ ID NO: 106353 - DNA, 80 bp, synthetic construct
  source 1..80: mol_type = other DNA
gtgagttctagaatcagatgtagtcagcaagttgagttttcctaatcattgcttatttatgtgtagtcacttggggggaa

SEQ ID NO: 106354 - DNA, 80 bp, synthetic construct
  source 1..80: mol_type = other DNA
attaatgatctgatttatactttactattacatgtagcagtaagtagcctcttaagctcccagatatattttggagaaat

SEQ ID NO: 106355 - DNA, 80 bp, synthetic construct
  source 1..80: mol_type = other DNA
gcggtgttcttattttggtttttctgggacaatattaccttatagtagttgtctgattttctcactgtgcaaagggatct

SEQ ID NO: 106356 - DNA, 80 bp, synthetic construct; identical to SEQ ID NO: 20596
  source 1..80: mol_type = other DNA

SEQ ID NO: 106357 - DNA, 80 bp, synthetic construct
  source 1..80: mol_type = other DNA
acccacatcagaatagatttttgacagctctgggctaatactgtgttagttgctaccgaaagtaccattattgtatttgc

SEQ ID NO: 106358 - DNA, 80 bp, synthetic construct
  source 1..80: mol_type = other DNA
atgacagtctcactataggcagcatattctaaatgggtcatataggttaagcacttgagaacccagttccttaatcactt

SEQ ID NO: 106359 - DNA, 80 bp, synthetic construct; identical to SEQ ID NO: 20597
  source 1..80: mol_type = other DNA

SEQ ID NO: 106360 - DNA, 80 bp, synthetic construct
  source 1..80: mol_type = other DNA
ggggctgaggcaggagaaatggcgtgaacccgggaggcggagcttgcagtgagcagagagcgagtcactgcactccagcc

SEQ ID NO: 106361 - DNA, 80 bp, synthetic construct
  source 1..80: mol_type = other DNA
gctattttacgtgagctgatttagtcgtattgtttaactttattttacatacttagaattgtataagggaagtattcagt

SEQ ID NO: 106362 - DNA, 80 bp, synthetic construct
  source 1..80: mol_type = other DNA
aaatatgaacaaaaccataattaacctttaaagataacttgcagaatctgggggatgagtaggaagggaggttgctaaaa

SEQ ID NO: 106363 - DNA, 80 bp, synthetic construct; identical to SEQ ID NO: 20598
  source 1..80: mol_type = other DNA

SEQ ID NO: 106364 - DNA, 80 bp, synthetic construct
  source 1..80: mol_type = other DNA
gagaagcttgattctcttggtatattacatacagagagggcaattaatttcttgtacatctgggaatatgatggtgttct

SEQ ID NO: 106365 - DNA, 80 bp, synthetic construct
  source 1..80: mol_type = other DNA
taattttctgctctgcttttctctgtcaaaccctagcattctgccattactagtatcagtgctgatagtgattaattttt

SEQ ID NO: 106366 - DNA, 80 bp, synthetic construct
  source 1..80: mol_type = other DNA
gccagacgtacagtggtgttttgctggcatttgaaatatgtttgtgaagaaataagccactacaattagttagacattac

SEQ ID NO: 106367 - DNA, 80 bp, synthetic construct; identical to SEQ ID NO: 20599
  source 1..80: mol_type = other DNA

SEQ ID NO: 106368 - DNA, 80 bp, synthetic construct
  source 1..80: mol_type = other DNA
atagttgagaaaaaagtaggcagcctttataaaagcaaattaacccatgtgggccttaatttttagacagcactaccacc

SEQ ID NO: 106369 - DNA, 80 bp, synthetic construct
  source 1..80: mol_type = other DNA
ttttctgttttttaaaaatgtttttacatcttttattcatcctgtgattttgtttcattaaatagtgcttttcagtattt

SEQ ID NO: 106370 - DNA, 80 bp, synthetic construct
  source 1..80: mol_type = other DNA
tgtgtcttgtatatccacgcataatggattgaaaccctttgagtgctaagttctcaaggtttccctcagcgtagtattca

SEQ ID NO: 106371 - DNA, 80 bp, synthetic construct; identical to SEQ ID NO: 20600
  source 1..80: mol_type = other DNA

SEQ ID NO: 106372 - DNA, 80 bp, synthetic construct
  source 1..80: mol_type = other DNA
ttttccttccagtcatataaacaggtatatgtaaattgacaggggctcctactctatgtgtattgtatatatcttgcttc

SEQ ID NO: 106373 - DNA, 80 bp, synthetic construct
  source 1..80: mol_type = other DNA
agtagtatctacctcaaggggtgttcgtaagaagtaaacgtaataatttatgtgaggtgtttagcacagtgttttaacac

SEQ ID NO: 106374 - DNA, 80 bp, synthetic construct
  source 1..80: mol_type = other DNA
tattaaatgttggatataaaattatgtgtaaattgtgtaataatagcacttggcagatagcactgaaatgttagttatta

SEQ ID NO: 106375 - DNA, 80 bp, synthetic construct; identical to SEQ ID NO: 20601
  source 1..80: mol_type = other DNA

SEQ ID NO: 106376 - DNA, 80 bp, synthetic construct
  source 1..80: mol_type = other DNA
tggaattatggggtcacttctcagatgagtacaatactcatcatgacatgagttaatcaacagtttgagtagtcaatata

SEQ ID NO: 106377 - DNA, 80 bp, synthetic construct
  source 1..80: mol_type = other DNA
aactatagcttaaaaagccaggaaagaatcttaagtacatgccgaaaagaaaaataattcactctattcaggatctctgg

SEQ ID NO: 106378 - DNA, 80 bp, synthetic construct
  source 1..80: mol_type = other DNA
aacacttgaaaataaaatactgaaagtcccttgtaacacaaacatagattttgaatttttttctcatcctttcgtatctg

SEQ ID NO: 106379 - DNA, 80 bp, synthetic construct; identical to SEQ ID NO: 20602
  source 1..80: mol_type = other DNA

SEQ ID NO: 106380 - DNA, 80 bp, synthetic construct
  source 1..80: mol_type = other DNA
tcctcctgctaataattttatttatttatttatttatttatttttttccgagatgggatctcgctatgttgtccaggctg

SEQ ID NO: 106381 - DNA, 80 bp, synthetic construct
  source 1..80: mol_type = other DNA
atggggcacatgagatgttttgatacaggcatataatgcatgataatcacatcatggaagatggggtatacatcccttca

SEQ ID NO: 106382 - DNA, 80 bp, synthetic construct
  source 1..80: mol_type = other DNA
ccactacctttcccagcctctggtaaccatccttctactctctgtctctatgggttcaattgttttgatttttagatccc

SEQ ID NO: 106383 - DNA, 80 bp, synthetic construct; identical to SEQ ID NO: 20603
  source 1..80: mol_type = other DNA

SEQ ID NO: 106384 - DNA, 80 bp, synthetic construct
  source 1..80: mol_type = other DNA
taggtctacataattttctttgtgtaaatgttctgttattgattatgttggtttaatttttcttctagctgtttaaaaaa

SEQ ID NO: 106385 - DNA, 80 bp, synthetic construct
  source 1..80: mol_type = other DNA
tgctgatttaagaggcaaatacttgttctggttagggaaaaggtgatattagtggggcagaagcattcttttaacgatat

SEQ ID NO: 106386 - DNA, 80 bp, synthetic construct
  source 1..80: mol_type = other DNA
atcactaaaaccaatactcatgtaaccactacacagattgagaactaaaacattatggcatcccagaaaccctcctaccc

SEQ ID NO: 106387 - DNA, 80 bp, synthetic construct
  source 1..80: mol_type = other DNA
gcagtcatgcaattcggctcactgcaacctccacctccaggttcaagccattctcctgcctcagcctcccgagtagctgg

SEQ ID NO: 106388 - DNA, 80 bp, synthetic construct; identical to SEQ ID NO: 20604
  source 1..80: mol_type = other DNA

SEQ ID NO: 106389 - DNA, 80 bp, synthetic construct
  source 1..80: mol_type = other DNA
agtagagacggggtttcactatgttggtcaggctggtctcgaactcctgacctcttgatctgcccgcctcggcctcccaa

SEQ ID NO: 106390 - DNA, 80 bp, synthetic construct
  source 1..80: mol_type = other DNA
aaaacattgggtaattgttgtcttagacaatctctgtagttttggtttaaccagtgtacctatcagttgtttgctgaagc

SEQ ID NO: 106391 - DNA, 80 bp, synthetic construct
  source 1..80: mol_type = other DNA
gtgattctcccatctcagcctcccgtgtagctgggactacaggtggacacaaccacgcccagccaatttttctatttttc

SEQ ID NO: 106392 - DNA, 80 bp, synthetic construct; identical to SEQ ID NO: 20605
  source 1..80: mol_type = other DNA

SEQ ID NO: 106393 - DNA, 80 bp, synthetic construct
  source 1..80: mol_type = other DNA
ttacaagttgttttcttttaaaaaaattttaagcatcaatcatacttcattttaggttattttttttttttccgtaagat

SEQ ID NO: 106394 - DNA, 80 bp, synthetic construct
  source 1..80: mol_type = other DNA
gctttcgcttcctctttgaaatctgttcagtcttcacatagataaaaggttattcaggtcccatcttttcagatgggatg

SEQ ID NO: 106395 - DNA, 80 bp, synthetic construct; identical to SEQ ID NO: 20606
  source 1..80: mol_type = other DNA

SEQ ID NO: 106396 - DNA, 80 bp, synthetic construct
  source 1..80: mol_type = other DNA
tccaaagttaaaattgtggtagttaacatgacctgacttcactaaaaataccttttgctatggcataggtgggacaaatg

SEQ ID NO: 106397 - DNA, 80 bp, synthetic construct
  source 1..80: mol_type = other DNA
caactgtgtgattagagtataattaaccttaactcagggatgggatagctgacttgcttatgcactttctctcaattagg

SEQ ID NO: 106398 - DNA, 80 bp, synthetic construct
  source 1..80: mol_type = other DNA
attatttctgttctttaaattctcagttgacctggtcctttgaggtaagaaccaaattccagattttaaaaaatgacttt

SEQ ID NO: 106399 - DNA, 80 bp, synthetic construct
  source 1..80: mol_type = other DNA
tctcccctccctttaccctttcttttaggaaaaactgtgttgtggagtgcaagtgaaagccttatatctttctcatggga

SEQ ID NO: 106400 - DNA, 80 bp, synthetic construct; identical to SEQ ID NO: 20607
  source 1..80: mol_type = other DNA

SEQ ID NO: 106401 - DNA, 80 bp, synthetic construct
  source 1..80: mol_type = other DNA
atataatgataaaagatagccttttttatgttagtaggtttctatgtttcgaatagtaagtataccttttgaaattcagt

SEQ ID NO: 106402 - DNA, 80 bp, synthetic construct
  source 1..80: mol_type = other DNA
tacagtcattaaaatgtttaaaagtttatataatgaggctgggtgcggtggctcacacctataatcccagcactttggga

SEQ ID NO: 106403 - DNA, 80 bp, synthetic construct
  source 1..80: mol_type = other DNA
gtggaggttgcagtgagctgagatcgtgccactgcaccccagcctgggtgacagagtgagactccatttcaaaaaaaaaa

SEQ ID NO: 106404 - DNA, 80 bp, synthetic construct; identical to SEQ ID NO: 20608
  source 1..80: mol_type = other DNA

SEQ ID NO: 106405 - DNA, 80 bp, synthetic construct
  source 1..80: mol_type = other DNA
atagtacttgttgagttgtaagggtttaatgagaattcatactacatgctcctgacacatagtaagtgttgtaaatatgt

SEQ ID NO: 106406 - DNA, 80 bp, synthetic construct
  source 1..80: mol_type = other DNA
atgtaatttcttttttcttcctaaggttgcacataggcaaaggtgtgcagttggaatgtaaaggtgaaggtgatgtttgg

SEQ ID NO: 106407 - DNA, 80 bp, synthetic construct; identical to SEQ ID NO: 20609
  source 1..80: mol_type = other DNA

SEQ ID NO: 106408 - DNA, 80 bp, synthetic construct
  source 1..80: mol_type = other DNA
gtgatctcggctcactgcaacctgcgcctcctgggttcaagcaattctcgtgcctcagcatcccaagtagctgggattac

SEQ ID NO: 106409 - DNA, 80 bp, synthetic construct
  source 1..80: mol_type = other DNA
gttacatgttttagagtaatacaaaggctcttgaaaatactgagtgaagcctccaaagttgtattcctgtaacttgaaat

SEQ ID NO: 106410 - DNA, 80 bp, synthetic construct
  source 1..80: mol_type = other DNA
acctgtttttgaaagagaaaggcagttgtaattagatagcctaaatatatttttaattgtgtgtcatcctcaacattttc

SEQ ID NO: 106411 - DNA, 80 bp, synthetic construct
  source 1..80: mol_type = other DNA
ctcacaacagcaaacccagtttctcatttccagttatagttcagttaaagaatgttggaatttttttatatgacactttt

SEQ ID NO: 106412 - DNA, 80 bp, synthetic construct; identical to SEQ ID NO: 20610
  source 1..80: mol_type = other DNA

SEQ ID NO: 106413 - DNA, 80 bp, synthetic construct
  source 1..80: mol_type = other DNA
taaggcctgatttagtggctcatgcgtgtaatcttagcactttcggaggccaaggttggaggattgcttgagaccaggag

SEQ ID NO: 106414 - DNA, 80 bp, synthetic construct
  source 1..80: mol_type = other DNA
tcatgccactgtgctccagactaggtgatagagtgagaccctttctcaaaaataaataaataaatagacaatacatagac

SEQ ID NO: 106415 - DNA, 80 bp, synthetic construct
  source 1..80: mol_type = other DNA
tgctgtattattattatttttgagacagagtcttgctctgtcacccaggctagagtacagtggtgccatcttggctcact

SEQ ID NO: 106416 - DNA, 80 bp, synthetic construct; identical to SEQ ID NO: 20611
  source 1..80: mol_type = other DNA

SEQ ID NO: 106417 - DNA, 80 bp, synthetic construct
  source 1..80: mol_type = other DNA
agaaccaaatcttataaatttaggaagtagggggactttgtctcctgaggaaattgagttccattctgcaggtatgcttg

SEQ ID NO: 106418 - DNA, 80 bp, synthetic construct
  source 1..80: mol_type = other DNA
ctccatattattccaagaagtcaaattcctgttccctgccctttgtttatggtcttggtatacccctagtacctcctatc

SEQ ID NO: 106419 - DNA, 80 bp, synthetic construct
  source 1..80: mol_type = other DNA
tttgtatgtggttgaagcagagagagaaggtgattatgtatacccacttaacccatcttgactcagaagtctcttgtttt

SEQ ID NO: 106420 - DNA, 80 bp, synthetic construct; identical to SEQ ID NO: 20612
  source 1..80: mol_type = other DNA

SEQ ID NO: 106421 - DNA, 80 bp, synthetic construct
  source 1..80: mol_type = other DNA
actgttctttagaagagtcttactagtcagaaagagacagttacaagtacaaccccatccacaatttcactttccatggc

SEQ ID NO: 106422 - DNA, 80 bp, synthetic construct
  source 1..80: mol_type = other DNA
gctgttctgagtagatgatgaaatctcactccattctgcttgggatgtaaaaccttttgccagcatatccatgctgtcta

SEQ ID NO: 106423 - DNA, 80 bp, synthetic construct
  source 1..80: mol_type = other DNA
attacctgttgttgttaatctcttactatgcctaatttgtaagttaaacttcattatgaggtatgtatgtataggaaaaa

SEQ ID NO: 106424 - DNA, 80 bp, synthetic construct; identical to SEQ ID NO: 20613
  source 1..80: mol_type = other DNA

SEQ ID NO: 106425 - DNA, 80 bp, synthetic construct
  source 1..80: mol_type = other DNA
tataagccaagaagctaggactaaattgtggtttttttcacccttctaagttgactttttttcctgcttctctcatgaca

SEQ ID NO: 106426 - DNA, 80 bp, synthetic construct
  source 1..80: mol_type = other DNA
ttctctttaagtggccttgttcttttgctttcaaaagtaaaatatgttttgttttgtgttatttagcactgggcgtttca

SEQ ID NO: 106427 - DNA, 80 bp, synthetic construct; identical to SEQ ID NO: 20614
  source 1..80: mol_type = other DNA

SEQ ID NO: 106428 - DNA, 80 bp, synthetic construct
  source 1..80: mol_type = other DNA
catcagtttatccattgatggacttgatttccactttttggctatgttatgaaggatactgctatgaacatttgtgtata

SEQ ID NO: 106429 - DNA, 80 bp, synthetic construct
  source 1..80: mol_type = other DNA
tgggtttgtttttgaacacatttattttagaggaaggggcagcagatgcttctaaaccactggtggactaggtcagaggg

SEQ ID NO: 106430 - DNA, 80 bp, synthetic construct; identical to SEQ ID NO: 20615
  source 1..80: mol_type = other DNA

SEQ ID NO: 106431 - DNA, 80 bp, synthetic construct
  source 1..80: mol_type = other DNA
ctgagccaaaaagaatatttaaagcctttgattactttgaattgcctttgtcaacaatttagtcaaattatgaaaggaag

SEQ ID NO: 106432 - DNA, 80 bp, synthetic construct
  source 1..80: mol_type = other DNA
gtttgagtgctataattacgtaaataatctgtggaagggaggtttgctgaggtgcccaatgaatcatttttactgcatct

SEQ ID NO: 106433 - DNA, 80 bp, synthetic construct
  source 1..80: mol_type = other DNA
tcgtgggggtgggggagtgttaatgttaaaggcatacttgaatcttggagattataattaagttttattccctactccca

SEQ ID NO: 106434 - DNA, 80 bp, synthetic construct
  source 1..80: mol_type = other DNA
gataatataagagaaaaagtgagaactttttttttgagacggagtcttgctctgttgcccaggctggagtgcagtggtgc

SEQ ID NO: 106435 - DNA, 80 bp, synthetic construct; identical to SEQ ID NO: 20616
  source 1..80: mol_type = other DNA

SEQ ID NO: 106436 - DNA, 80 bp, synthetic construct
  source 1..80: mol_type = other DNA
aactcttaaaactcaacaataaaataatgcaacaataaaataaacaatgggcagaatagactgggcatagtgattgactc

SEQ ID NO: 106437 - DNA, 80 bp, synthetic construct
  source 1..80: mol_type = other DNA
gggaggctgatgtgggaggacccttgagcccaggtgttcaagactagcttgggcaacatagcaagaccccatcttaacaa

SEQ ID NO: 106438 - DNA, 80 bp, synthetic construct; identical to SEQ ID NO: 20617
  source 1..80: mol_type = other DNA

SEQ ID NO: 106439 - DNA, 80 bp, synthetic construct
  source 1..80: mol_type = other DNA
aatgccttccaaatgtcatagcctagaagttctgaaacgaatggactgtgagaaatttgaggaagtagtggtttcacttc

SEQ ID NO: 106440 - DNA, 80 bp, synthetic construct
  source 1..80: mol_type = other DNA
gccaccatgcccctgtcattgctttctttactaaagtattttaggacctaatagtccaggaaatacatatatgtatattg

SEQ ID NO: 106441 - DNA, 80 bp, synthetic construct
  source 1..80: mol_type = other DNA
gcaatttgttatttggagagtgtatgttattgtatgtttttgtggttcatgtaaataccatggttgaagatgatcagaat

SEQ ID NO: 106442 - DNA, 80 bp, synthetic construct; identical to SEQ ID NO: 20618
  source 1..80: mol_type = other DNA

SEQ ID NO: 106443 - DNA, 80 bp, synthetic construct
  source 1..80: mol_type = other DNA
cattccagtactttcataaatataagggtagatatggcaaccccttccttactatgccagttcttcacttggttgataaa

SEQ ID NO: 106444 - DNA, 80 bp, synthetic construct
  source 1..80: mol_type = other DNA
cccatataattagcaggtatcggtgatgggatttaaaactgggccttttttttccttaaaaattatgaacatttacaaac

SEQ ID NO: 106445 - DNA, 80 bp, synthetic construct
  source 1..80: mol_type = other DNA
acgcatctctgaaaaatgttgatctctcttatatagcgacagtgccattttgttaaactcctccaaataagcaaaaatga

SEQ ID NO: 106446 - DNA, 80 bp, synthetic construct; identical to SEQ ID NO: 20619
  source 1..80: mol_type = other DNA

SEQ ID NO: 106447 - DNA, 80 bp, synthetic construct
  source 1..80: mol_type = other DNA
tttttctttatgaactcatagtatgaaatgttttttcttaaaaggtctttgatttgcgtcagtgtcatcgacagatgcag

SEQ ID NO: 106448 - DNA, 80 bp, synthetic construct
  source 1..80: mol_type = other DNA
ttactcagttgattagtttctttgagcagtaatagaaattaaagtttttttttactgggatgatgacatttttgaattgg

SEQ ID NO: 106449 - DNA, 80 bp, synthetic construct
  source 1..80: mol_type = other DNA
caccagccagggtgggttgtaatcactgaagtgcttggctttattctagtaaggaaagcatatttcaatttcagaattgg

SEQ ID NO: 106450 - DNA, 80 bp, synthetic construct; identical to SEQ ID NO: 20620
  source 1..80: mol_type = other DNA

SEQ ID NO: 106451 - DNA, 80 bp, synthetic construct
  source 1..80: mol_type = other DNA
gatgaatgcagatggactatatgactgtatgttctgactggaaaattagatgcagtctccattgtgacttatgttcagga

SEQ ID NO: 106452 - DNA, 80 bp, synthetic construct
  source 1..80: mol_type = other DNA
actgagtaatagtgtattactctgttacactttgaaattgagagagagacttcatctcggtcatctaagaggtcttagtg

SEQ ID NO: 106453 - DNA, 80 bp, synthetic construct
  source 1..80: mol_type = other DNA
gaggtgttggtggattgtggtaatttactttataattggttgtagctagaagacacatgtgaaatgtaaagttccttaac

SEQ ID NO: 106454 - DNA, 80 bp, synthetic construct; identical to SEQ ID NO: 20621
  source 1..80: mol_type = other DNA

SEQ ID NO: 106455 - DNA, 80 bp, synthetic construct
  source 1..80: mol_type = other DNA
ttaccgttggggcccttaaccttatcaggatggtggactacaaaatacaatcctgtttataatctgaagatatatttcac

SEQ ID NO: 106456 - DNA, 80 bp, synthetic construct
  source 1..80: mol_type = other DNA
cttcacctgttatgtatgaaggaatcattccagtgctagaaaatttagccctttaaaacgtcttagagccttttatctgc

SEQ ID NO: 106457 - DNA, 80 bp, synthetic construct
  source 1..80: mol_type = other DNA
ccaagagtaactttactctgtgtttaaaaagtaagttaataatgtattgtaatctttcatccaaaatattttttgcaagt

SEQ ID NO: 106458 - DNA, 80 bp, synthetic construct; identical to SEQ ID NO: 20622
  source 1..80: mol_type = other DNA

SEQ ID NO: 106459 - DNA, 80 bp, synthetic construct
  source 1..80: mol_type = other DNA
ctatgttaaatactgtgcagaataatggaaacattacagttcataataggtagtttggatatttttgtacttgatttgat

SEQ ID NO: 106460 - DNA, 80 bp, synthetic construct
  source 1..80: mol_type = other DNA
gagaatttaagtagaaaagttgcagatgtattgactgtaccacagacacaatatgtatgctttttacctagctggtagca

SEQ ID NO: 106461 - DNA, 80 bp, synthetic construct
  source 1..80: mol_type = other DNA
gcaacagccagttctattgggcagctttgtttttttccctcacactctaccgggacttccccatggacattgtgtatcat

SEQ ID NO: 106462 - DNA, 80 bp, synthetic construct; identical to SEQ ID NO: 20623
  source 1..80: mol_type = other DNA

SEQ ID NO: 106463 - DNA, 80 bp, synthetic construct
  source 1..80: mol_type = other DNA
attttcttctgtaaaagtttggtgatttaagttttattggcagttttataaaaagacatcttctctagaaattgctaact

SEQ ID NO: 106464 - DNA, 80 bp, synthetic construct
  source 1..80: mol_type = other DNA
tgcagtggtatgatctcagctcactgcaacctctgcctcccgggttcaactgattctcctgcctcagcctccctggtagc

SEQ ID NO: 106465 - DNA, 80 bp, synthetic construct
  source 1..80: mol_type = other DNA
cctggcctcattgttcccttttctactttaaggaaagttttcatgtttaatcatctggggaaagtatgtgaaaaatattt

SEQ ID NO: 106466 - DNA, 80 bp, synthetic construct
  source 1..80: mol_type = other DNA
cgcttttgagaaaacatctagtatgttatgatcagctattcctgagagcttggttgttaatctatatttctatttcttag

SEQ ID NO: 106467 - DNA, 80 bp, synthetic construct; identical to SEQ ID NO: 20624
  source 1..80: mol_type = other DNA

SEQ ID NO: 106468 - DNA, 80 bp, synthetic construct
  source 1..80: mol_type = other DNA
accttgctttttccagaaacatggctgttttgtattgctgtaaccactaaataggttgcctataccattcctcctgtgaa

SEQ ID NO: 106469 - DNA, 80 bp, synthetic construct
  source 1..80: mol_type = other DNA
agggtgtggtgtgtaaaggggggtgtttgtaatacaagttgaaggcaaaataaaatgtcctgtctcccagatgatataca

SEQ ID NO: 106470 - DNA, 80 bp, synthetic construct; identical to SEQ ID NO: 20625
  source 1..80: mol_type = other DNA

SEQ ID NO: 106471 - DNA, 80 bp, synthetic construct
  source 1..80: mol_type = other DNA
ggcaaatttaggttacggaggtaaatgagtatatgaaagcaattacctctaaagccagttaacaattattttgtaggtgg

SEQ ID NO: 106472 - DNA, 80 bp, synthetic construct
  source 1..80: mol_type = other DNA
actaagtaatttctttgaacataccaagaagtatgtaaaaagtccatggccttattcatccacaaagtggcatcctaggc

SEQ ID NO: 106473 - DNA, 80 bp, synthetic construct
  source 1..80: mol_type = other DNA
gtatatcagaggatatactagatggtaacatttctttctgtgcttggctatctttgtggacttcaggggcttctaaaaca

SEQ ID NO: 106474 - DNA, 80 bp, synthetic construct; identical to SEQ ID NO: 20626
  source 1..80: mol_type = other DNA

SEQ ID NO: 106475 - DNA, 80 bp, synthetic construct
  source 1..80: mol_type = other DNA
attttcccccttagaataatattttgaaaggtttcattgcttccacttgaatgctgctcttacaaaaactggggttacaa

SEQ ID NO: 106476 - DNA, 80 bp, synthetic construct
  source 1..80: mol_type = other DNA
agatatttttgacctataggtgcctttatgagaattgagggtctgacatcctgccccaaggagtagctaaagtaattgct

SEQ ID NO: 106477 - DNA, 80 bp, synthetic construct
  source 1..80: mol_type = other DNA
tcatttctctctgttgatgtggatacttttcacaccgtttatttaaatgctttctcaataggtccagagccagtgttctt

SEQ ID NO: 106478 - DNA, 80 bp, synthetic construct
  source 1..80: mol_type = other DNA
tgcctcatctgtaaaatgagggagttggagtagattaattattccagctctgaaattctaagtgaccttggctaccttgc

SEQ ID NO: 106479 - DNA, 80 bp, synthetic construct; identical to SEQ ID NO: 20627
  source 1..80: mol_type = other DNA

SEQ ID NO: 106480 - DNA, 80 bp, synthetic construct
  source 1..80: mol_type = other DNA
acattatagcttttgagttggtgtgtgtgacaccaccctcctaagtggtgtgtgcttgtaattttttttttcagtgaaaa

SEQ ID NO: 106481 - DNA, 80 bp, synthetic construct
  source 1..80: mol_type = other DNA
agtgacttttggctggatcattcagagctctcttctagcctacccttggatgagtacaattaatgaaattcatattttca

SEQ ID NO: 106482 - DNA, 80 bp, synthetic construct; identical to SEQ ID NO: 20628
  source 1..80: mol_type = other DNA

SEQ ID NO: 106483 - DNA, 80 bp, synthetic construct
  source 1..80: mol_type = other DNA
cccaggagttcctttgtggctttctgtatacttttgcctggttaaagtctgtggctaaaaaatagtcgaacctttcttga

SEQ ID NO: 106484 - DNA, 80 bp, synthetic construct; identical to SEQ ID NO: 20629
  source 1..80: mol_type = other DNA

SEQ ID NO: 106485 - DNA, 80 bp, synthetic construct
  source 1..80: mol_type = other DNA
ctaggaagaggcgtgggctcgatctctgccacatccacctcgggaaaccacaaggtctcgatgggtgattttgcctaaag

SEQ ID NO: 106486 - DNA, 80 bp, synthetic construct
  source 1..80: mol_type = other DNA
gcccagcctggagtacagtgctgtgaatctgctgtgtgacccaaggagagttacttaacctctctgtgccccggttttcc

SEQ ID NO: 106487 - DNA, 80 bp, synthetic construct
  source 1..80: mol_type = other DNA
gaccatcctggataacatggtgaaaccctgtctctactaaaaatacaaaaataagccggacatgatggtacgtacctgtg

SEQ ID NO: 106488 - DNA, 80 bp, synthetic construct; identical to SEQ ID NO: 20630
  source 1..80: mol_type = other DNA

SEQ ID NO: 106489 - DNA, 80 bp, synthetic construct
  source 1..80: mol_type = other DNA
gcctcccaagtagctgggattacaggcacgtgccaccatgcccggctaatttttgtattttcagtagaggcagggtttca

SEQ ID NO: 106490 - DNA, 80 bp, synthetic construct; identical to SEQ ID NO: 20631
  source 1..80: mol_type = other DNA

SEQ ID NO: 106491 - DNA, 80 bp, synthetic construct
  source 1..80: mol_type = other DNA
aggcttccagctctggcccaggcccaggtcctcggtgccatgtgaagggtggagagctctcctgggggacagagttgtac

SEQ ID NO: 106492 - DNA, 80 bp, synthetic construct
  source 1..80: mol_type = other DNA
gtggaagtggggttgccagatcaaacacaagacacccagttaaaattcaactgtaggtacgtgacgagtactttttgttg

SEQ ID NO: 106493 - DNA, 80 bp, synthetic construct
  source 1..80: mol_type = other DNA
ccgccgccacacccggctaattttttgtatttttagtagagacggggttccaccatcctggccaggctggtcttgaactc

SEQ ID NO: 106494 - DNA, 80 bp, synthetic construct; identical to SEQ ID NO: 20632
  source 1..80: mol_type = other DNA

SEQ ID NO: 106495 - DNA, 80 bp, synthetic construct
  source 1..80: mol_type = other DNA
ctttctttctttctttctttctttctttctttctctctttctttctctctctctctctatttccttctttctttctttct

SEQ ID NO: 106496 - DNA, 80 bp, synthetic construct
  source 1..80: mol_type = other DNA
cctgtcttaattatttcaaattgcagaaaacttcagacaaacatgaaggttgtttgtaaggaccttcttgggctgtgcct

SEQ ID NO: 106497 - DNA, 80 bp, synthetic construct
  source 1..80: mol_type = other DNA
ccgcacagagcctcagacctgggcaggtgaggcaggcaggtgggtctggcccggcgcggcccgatgcgggggcagggatg

SEQ ID NO: 106498 - DNA, 80 bp, synthetic construct; identical to SEQ ID NO: 20633
  source 1..80: mol_type = other DNA

SEQ ID NO: 106499 - DNA, 80 bp, synthetic construct
  source 1..80: mol_type = other DNA
tttctggctctctttgtctctctgtgtctcagtttatttctgtctctttctgtgtctctttgtctgtgtctctgtgtccc

SEQ ID NO: 106500 - DNA, 80 bp, synthetic construct
  source 1..80: mol_type = other DNA
tcctgcctcagcctcccaagtagctgggagtacaggtgcccgccaccacgcccggctaatttttttttttgcatttttta

SEQ ID NO: 106501 - DNA, 80 bp, synthetic construct; identical to SEQ ID NO: 20634
  source 1..80: mol_type = other DNA

SEQ ID NO: 106502 - DNA, 80 bp, synthetic construct
  source 1..80: mol_type = other DNA
ctctgtctatctctgtctcagtcccttcttttgccaccatccccctcccgtggccgccctcacgtgtcagcaccataccc

SEQ ID NO: 106503 - DNA, 80 bp, synthetic construct
  source 1..80: mol_type = other DNA
caggtcggggcagcctctgtgccaagacaactttagggaacaacaaacctgtctgacgggtttgagattccacatgggac

SEQ ID NO: 106504 - DNA, 80 bp, synthetic construct
  source 1..80: mol_type = other DNA
agatcagcaatctgccggtcgccctgtgcagggaggataaacagggagaaggcactgcacatgcaaagtctcagcgggga

SEQ ID NO: 106505 - DNA, 80 bp, synthetic construct; identical to SEQ ID NO: 20635
  source 1..80: mol_type = other DNA

SEQ ID NO: 106506 - DNA, 80 bp, synthetic construct
  source 1..80: mol_type = other DNA
cgtctctactgaatatacaaaaaaattagctgggggtggtggcgggcgcctataatcccagctactcggcaggctgaggc

SEQ ID NO: 106507 - DNA, 80 bp, synthetic construct
  source 1..80: mol_type = other DNA
agacagggttttgctctgtcgcccaggctggagtgcagtggtgtgatctcggctcacagaacccttgaactccttgcctg

SEQ ID NO: 106508 - DNA, 80 bp, synthetic construct
  source 1..80: mol_type = other DNA
gagaccagcctcaccaacgtggtgaaaccctttctctactaaaaaaaaaaaacaaaaacaaaattagccaggcatggtgg

SEQ ID NO: 106509 - DNA, 80 bp, synthetic construct; identical to SEQ ID NO: 20636
  source 1..80: mol_type = other DNA

SEQ ID NO: 106510 - DNA, 80 bp, synthetic construct
  source 1..80: mol_type = other DNA
accccctgggcccacatctaaggacgacaaggcagaggcctcaaatgccaggtcctgtggctttgtccccggggcggtgg

SEQ ID NO: 106511 - DNA, 80 bp, synthetic construct
  source 1..80: mol_type = other DNA
ggcaggttggggccatgtattcatccgagatgaatttctcagtgccacccagggccaggccccacttgcaggtgccaggg

SEQ ID NO: 106512 - DNA, 80 bp, synthetic construct
  source 1..80: mol_type = other DNA
caccatggctgccctgagtgtacgcagtggtcagcccagtgctgatgtcacctgtgtggggacttcctggaccttcacct

SEQ ID NO: 106513 - DNA, 80 bp, synthetic construct; identical to SEQ ID NO: 20637
  source 1..80: mol_type = other DNA

SEQ ID NO: 106514 - DNA, 80 bp, synthetic construct
  source 1..80: mol_type = other DNA
ttagtacagacagggtttcgccatgttggccaggctggtcttgaactcctgacctcaggtgatccacccgcctcagcctc

SEQ ID NO: 106515 - DNA, 80 bp, synthetic construct
  source 1..80: mol_type = other DNA
acagggttgcaagcgggactggcagagttgaaacaaaagtcagggagcagggctgggcgcagtggctcaagcctataatc

SEQ ID NO: 106516 - DNA, 80 bp, synthetic construct
  source 1..80: mol_type = other DNA
gagaattgcttgaacctgggaggcggaggttgcagcgagccgaggtcgcaccactgcactccagcctgggtgacagagca

SEQ ID NO: 106517 - DNA, 80 bp, synthetic construct; identical to SEQ ID NO: 20638
  source 1..80: mol_type = other DNA

SEQ ID NO: 106518 - DNA, 80 bp, synthetic construct
  source 1..80: mol_type = other DNA
aaatacaaaaattagccgggggtggtggtgcacacctatagtcccagctactgaagaggctgaggcaggagaatctattg

SEQ ID NO: 106519 - DNA, 80 bp, synthetic construct
  source 1..80: mol_type = other DNA
aacaggaattttttgctcatggaactgaaagatttagggatagagctaactcaaggccacccctctcagcaccgttgatg

SEQ ID NO: 106520 - DNA, 80 bp, synthetic construct
  source 1..80: mol_type = other DNA
tcacccttggttgagccctactggtctggcgggtttcagacacagctggatccaggaccctcggtcagtgtcacaaggat

SEQ ID NO: 106521 - DNA, 80 bp, synthetic construct
  source 1..80: mol_type = other DNA
gcctcccgggttcaagtgattctcctgcctcagcctcccgagtagctgggactacgggcgtgcgacaccatgtctggcta

SEQ ID NO: 106522 - DNA, 80 bp, synthetic construct; identical to SEQ ID NO: 20639
  source 1..80: mol_type = other DNA

SEQ ID NO: 106523 - DNA, 80 bp, synthetic construct
  source 1..80: mol_type = other DNA
ctcgtggtcgggatgggcacggcggctcacgcctgtcatcccagcactttgggaggccgaggcgggcagatcatgaggtc

SEQ ID NO: 106524 - DNA, 80 bp, synthetic construct
  source 1..80: mol_type = other DNA
agatcgtgccactgcactcccagcctgggcaacagagtaagactctgtctcaaaaaaaaaaaaaagtacaaaacatgagc

SEQ ID NO: 106525 - DNA, 80 bp, synthetic construct
  source 1..80: mol_type = other DNA
ggccgagtgcggtggctcacgcctgtaatcccagcactttgggaggctgaggcgggtggatcacgaagtcaggagttcaa

SEQ ID NO: 106526 - DNA, 80 bp, synthetic construct; identical to SEQ ID NO: 20640
  source 1..80: mol_type = other DNA

SEQ ID NO: 106527 - DNA, 80 bp, synthetic construct
  source 1..80: mol_type = other DNA
gaggcaggagaatggtgtgaacccgggaggcagaggttgcagtgagccgagatcgcgccaccacactccagcctgggcga

SEQ ID NO: 106528 - DNA, 80 bp, synthetic construct
  source 1..80: mol_type = other DNA
agggctggcatggaggcagcaccagtagacatcagaggatgaatgagtgggatccagtgctgctcaatgaatacatgcgg

SEQ ID NO: 106529 - DNA, 80 bp, synthetic construct; identical to SEQ ID NO: 20641
  source 1..80: mol_type = other DNA

SEQ ID NO: 106530 - DNA, 80 bp, synthetic construct
  source 1..80: mol_type = other DNA
ttgagacggagtctcactctgtcgcccaggctggagtacagcggctccatcttggctcactgcaacctctgcctcttgtc

SEQ ID NO: 106531 - DNA, 80 bp, synthetic construct
  source 1..80: mol_type = other DNA
cctcagcctcccaaagtgctgggattacaggcgtgagtcaccgcgcctggccaattttttgtatttttagtagagatggg

SEQ ID NO: 106532 - DNA, 80 bp, synthetic construct
  source 1..80: mol_type = other DNA
ccgctctgtcacccaggctggagtgcagtggtgcgatcttggcccactgcaacctccacctcccaagttcaagcgattct

SEQ ID NO: 106533 - DNA, 80 bp, synthetic construct; identical to SEQ ID NO: 20642
  source 1..80: mol_type = other DNA

SEQ ID NO: 106534 - DNA, 80 bp, synthetic construct
  source 1..80: mol_type = other DNA
ctcactatgttgctcagcctggtctcgaactcctggcctcaagtgatcttcccgcctcagcctcccaaagccttgggatt

SEQ ID NO: 106535 - DNA, 80 bp, synthetic construct
  source 1..80: mol_type = other DNA
tggggtctcgtcggtaaagtggtggtggacggcatggaggaactttagccctggaccagaaactttaggtcagtctatgt

SEQ ID NO: 106536 - DNA, 80 bp, synthetic construct
  source 1..80: mol_type = other DNA
gcagacagggttgacgggggcagggtgtggggatgtgggagacccagactgggggccagcaaaggctgttcggaggaggt

SEQ ID NO: 106537 - DNA, 80 bp, synthetic construct
  source 1..80: mol_type = other DNA
tgagtagctgggattacaggcggccgccaccacgcacagctagttttgtatttttagtagagatggggtttctccatgtt

SEQ ID NO: 106538 - DNA, 80 bp, synthetic construct; identical to SEQ ID NO: 20643
  source 1..80: mol_type = other DNA

SEQ ID NO: 106539 - DNA, 80 bp, synthetic construct
  source 1..80: mol_type = other DNA
cacttcagcctgggggacagagtgagaccctgtctgaaaaaaaaaaaaattgggccaggtgcggtggctcatgcctgtaa

SEQ ID NO: 106540 - DNA, 80 bp, synthetic construct
  source 1..80: mol_type = other DNA
agagaatggcctgaacccaggaggcggagcttgcagtaagctgagattgtgccactgcactccagcttgggcgacagagc

SEQ ID NO: 106541 - DNA, 80 bp, synthetic construct; identical to SEQ ID NO: 20644
  source 1..80: mol_type = other DNA

SEQ ID NO: 106542 - DNA, 80 bp, synthetic construct
  source 1..80: mol_type = other DNA
tcatcccagctaactgggaggctgaggcaggagaatcacttgaactggggagaaggaggttgcagtgagccaagacagct

SEQ ID NO: 106543 - DNA, 80 bp, synthetic construct
  source 1..80: mol_type = other DNA
ccaggtaatacccaagtacccacgggaggatcaacatccacggaaaagcctgtgtacaaatttcatagtagcaaatgctt

SEQ ID NO: 106544 - DNA, 80 bp, synthetic construct
  source 1..80: mol_type = other DNA
ggactacaggcgcgcgccactgcgaggctaattttttgtacttttagtagagacggggtttcaccgtgttagccaggatg

SEQ ID NO: 106545 - DNA, 80 bp, synthetic construct; identical to SEQ ID NO: 20645
  source 1..80: mol_type = other DNA

SEQ ID NO: 106546 - DNA, 80 bp, synthetic construct
  source 1..80: mol_type = other DNA
gtgcgatctcagctcactgcaacctctgcctccagggttcaagcgattctcctgcctcagcctcacgagtagctgggatt

SEQ ID NO: 106547 - DNA, 80 bp, synthetic construct
  source 1..80: mol_type = other DNA
ttatgtgccttttaatctgcaggttcgccctccctctctctttctgtggtttgtttttgtttttttttttctttttttct

SEQ ID NO: 106548 - DNA, 80 bp, synthetic construct
  source 1..80: mol_type = other DNA
agtcaaaagcatacccagactgcagccgctggggaagagtgtggtagctccacaagaagttaaacggaggcggggtacgg

SEQ ID NO: 106549 - DNA, 80 bp, synthetic construct; identical to SEQ ID NO: 20646
  source 1..80: mol_type = other DNA

SEQ ID NO: 106550 - DNA, 80 bp, synthetic construct
  source 1..80: mol_type = other DNA
agtgagctacgattgcacctggaacccaggcctctcccgtctggaacccaggccctcacctacactgtcagcccctccac

SEQ ID NO: 106551 - DNA, 80 bp, synthetic construct
  source 1..80: mol_type = other DNA
gaacccagtcccccacctggaacctgggcctccccaacctgtaacccaggcccccacctagaacctgggcctctgtgatc

SEQ ID NO: 106552 - DNA, 80 bp, synthetic construct
  source 1..80: mol_type = other DNA
cacggtggctcacgcctgtaatcccagcactttgggaggccgaggcaggtggatcacaaggtcaggagttcaagactagc

SEQ ID NO: 106553 - DNA, 80 bp, synthetic construct; identical to SEQ ID NO: 20647
  source 1..80: mol_type = other DNA

SEQ ID NO: 106554 - DNA, 80 bp, synthetic construct
  source 1..80: mol_type = other DNA
gagtagcttggactacaggcgcccgccaccacgcccggctaattttttgtatttttaatagagacagggtttcaccgtgt

SEQ ID NO: 106555 - DNA, 80 bp, synthetic construct
  source 1..80: mol_type = other DNA
catgatctcggctcactgcaaccaccgccttccaggttcaagcgattctcccgcctcagcctcccaactagctgggatta

SEQ ID NO: 106556 - DNA, 80 bp, synthetic construct
  source 1..80: mol_type = other DNA
tatttttcacttttttttttttagccgaatgtggcgaggacagttatcggattatttgcagcggatcctacacgtcccct

SEQ ID NO: 106557 - DNA, 80 bp, synthetic construct; identical to SEQ ID NO: 20648
  source 1..80: mol_type = other DNA

SEQ ID NO: 106558 - DNA, 80 bp, synthetic construct
  source 1..80: mol_type = other DNA
ctgtcgcccaggccggactgcggactgcagtggcgccatctcggcgcactgcaacctctacctcccgggttcaagcgatt

SEQ ID NO: 106559 - DNA, 80 bp, synthetic construct
  source 1..80: mol_type = other DNA
gggattacaggcgtgagccaccgcgcccggccaaggccccgacttttagaccactagtggaggaggtctgggacacgggt

SEQ ID NO: 106560 - DNA, 80 bp, synthetic construct; identical to SEQ ID NO: 20649
  source 1..80: mol_type = other DNA

SEQ ID NO: 106561 - DNA, 80 bp, synthetic construct
  source 1..80: mol_type = other DNA
ggcctctcccatctgtaacccaggccctcacctagaacctgggacctctgaacctggaacccagcccccacctggggcct

SEQ ID NO: 106562 - DNA, 80 bp, synthetic construct
  source 1..80: mol_type = other DNA
taacacggtgaaaccccgtctctactaaaaatacaaaaaattagccaggcgttgtggcgggcgcctgtagtcccagctac

SEQ ID NO: 106563 - DNA, 80 bp, synthetic construct
  source 1..80: mol_type = other DNA
cctgaaacctgggcccctccacttgtaaccagggacccccacctagtatctgagcctctcccatctgtaacccaggcctt

SEQ ID NO: 106564 - DNA, 80 bp, synthetic construct; identical to SEQ ID NO: 20650
  source 1..80: mol_type = other DNA

SEQ ID NO: 106565 - DNA, 80 bp, synthetic construct
  source 1..80: mol_type = other DNA
gtgaggatgagagaatgcaaagaaagcattttccccaggactaccataaatagtcataagcatcactttttcctattacc

SEQ ID NO: 106566 - DNA, 80 bp, synthetic construct
  source 1..80: mol_type = other DNA
aggttcacgccattctcctgcctcagcatcccgagtagctgggactacaggcgcccgccaccgcgcccggctaatttttt

SEQ ID NO: 106567 - DNA, 80 bp, synthetic construct
  source 1..80: mol_type = other DNA
ccggccaaggccccgacttttagaccactagtggaggaggtctgggacacgggtctgcggccagagagaggccaggaggg

SEQ ID NO: 106568 - DNA, 80 bp, synthetic construct
  source 1..80: mol_type = other DNA
tgcaggctggagggcaggatctgtgtgtttggggggagtcatgggtgggtaggagagatgacaggtgacagcctggagga

SEQ ID NO: 106569 - DNA, 80 bp, synthetic construct; identical to SEQ ID NO: 20651
  source 1..80: mol_type = other DNA

SEQ ID NO: 106570 - DNA, 80 bp, synthetic construct
  source 1..80: mol_type = other DNA
gagaccatcctggctaacacggtgaaaccccgtctctactaaaaatacaaaaaattagccaggcgttgtggcgggcgcct

SEQ ID NO: 106571 - DNA, 80 bp, synthetic construct
  source 1..80: mol_type = other DNA
ctcaaagaaaaaaaaaaggaaaacccagttccccacctagaacccaggccccgacctgaaacctgggcccctccacttgt

SEQ ID NO: 106572 - DNA, 80 bp, synthetic construct
  source 1..80: mol_type = other DNA
tctataacccagaccctcacctagaacctgggcccctgcaactgtaacctgtggcactcactgtaagcccggacttcacc

SEQ ID NO: 106573 - DNA, 80 bp, synthetic construct; identical to SEQ ID NO: 20652
  source 1..80: mol_type = other DNA

SEQ ID NO: 106574 - DNA, 80 bp, synthetic construct
  source 1..80: mol_type = other DNA
aagctccgcctcccaggttcacgccattctcctgcctcagcatcccgagtagctgggactacaggcgcccaccaccacgc

SEQ ID NO: 106575 - DNA, 80 bp, synthetic construct
  source 1..80: mol_type = other DNA
atgagccaccgtgcccggctcactctgcctctttatatccagagtgtcatcaaatttatgaattcaaggccaggcttagt

SEQ ID NO: 106576 - DNA, 80 bp, synthetic construct
  source 1..80: mol_type = other DNA
tcgagaggctgagacaggagaatcgcttgaacccaggaggcagaggttgcagtgaaccaagactgcgtcactgcactcca

SEQ ID NO: 106577 - DNA, 80 bp, synthetic construct
  source 1..80: mol_type = other DNA
gttcaagaccagcctggccaatatggtgaaaccccgtctccactaaaaataaaaaaaaaaaacctagccaggtgtggtgg

SEQ ID NO: 106578 - DNA, 80 bp, synthetic construct; identical to SEQ ID NO: 20653
  source 1..80: mol_type = other DNA

SEQ ID NO: 106579 - DNA, 80 bp, synthetic construct
  source 1..80: mol_type = other DNA
tctgattccgccatatgatccggttccgtgctggcccagcctggcctgggttggatgcctggtccgatgcccaaagcccc

SEQ ID NO: 106580 - DNA, 80 bp, synthetic construct
  source 1..80: mol_type = other DNA
ttagaatagttcttttttaaaaaaaaaaattttttttttgagacaggatctggctctgttgccaggcaggaatgcagtgg

SEQ ID NO: 106581 - DNA, 80 bp, synthetic construct
  source 1..80: mol_type = other DNA
ttgcccaggctggagggcaatggcgcgatctcggctcactgcaacctccgcctcctaggttcaggcaattctcctgcttc

SEQ ID NO: 106582 - DNA, 80 bp, synthetic construct; identical to SEQ ID NO: 20654
  source 1..80: mol_type = other DNA

SEQ ID NO: 106583 - DNA, 80 bp, synthetic construct
  source 1..80: mol_type = other DNA
gcagcctcaaactcccagcctctgttgatcctactgcctcagcctcccgagtagctgggactacaagcgtgggccactgc

SEQ ID NO: 106584 - DNA, 80 bp, synthetic construct
  source 1..80: mol_type = other DNA
acaggcatgcaccactacgcctggctaatttttgtattttttaagtagagacaggctttcaccatgttgcccaggctggt

SEQ ID NO: 106585 - DNA, 80 bp, synthetic construct
  source 1..80: mol_type = other DNA
ctctcgggcatatatcttggggtggaattgccagtacatatagcaactctatgtttaaacttttgactcttttccaaagg

SEQ ID NO: 106586 - DNA, 80 bp, synthetic construct; identical to SEQ ID NO: 20655
  source 1..80: mol_type = other DNA

SEQ ID NO: 106587 - DNA, 80 bp, synthetic construct
  source 1..80: mol_type = other DNA
ctcagcctcccgagtacctgggattagaagggtgcgccaccacgcccaactaatttttgtatttttagtagagacggggt

SEQ ID NO: 106588 - DNA, 80 bp, synthetic construct
  source 1..80: mol_type = other DNA
ggcctcaaactcctaggctcaagagatcctcccaaagttctgggattacaggtgtgagccactgtgcataaccctgaagt

SEQ ID NO: 106589 - DNA, 80 bp, synthetic construct
  source 1..80: mol_type = other DNA
ggtggcgcgatcttggttcactgcaagctccgcctcctgggttcacgcctttctcctgtctcagcctcccgagtagctgg

SEQ ID NO: 106590 - DNA, 80 bp, synthetic construct; identical to SEQ ID NO: 20656
  source 1..80: mol_type = other DNA

SEQ ID NO: 106591 - DNA, 80 bp, synthetic construct
  source 1..80: mol_type = other DNA
tcttgaactcttgacctcaggtgatcacctgccttggccccccaaagtgctgggattacaggcaaaagccgccataccag

SEQ ID NO: 106592 - DNA, 80 bp, synthetic construct
  source 1..80: mol_type = other DNA
ggctaatttttgtatttttagtagagacagggttttaccacgttggccagactggtctcaaactcctgacctcgggtgat

SEQ ID NO: 106593 - DNA, 80 bp, synthetic construct
  source 1..80: mol_type = other DNA
atcacctgaggttaggagttcgggaccagcctgaacaatatggtgaaaccctgtctctattgaaaatccaaaaattatcc

SEQ ID NO: 106594 - DNA, 80 bp, synthetic construct; identical to SEQ ID NO: 20657
  source 1..80: mol_type = other DNA

SEQ ID NO: 106595 - DNA, 80 bp, synthetic construct
  source 1..80: mol_type = other DNA
gaccacgtctgcaaaggagaagtgaagtttgaagagaaggcaaaaagtgacaaagctcgctgtgacagggagattaaaaa

SEQ ID NO: 106596 - DNA, 80 bp, synthetic construct
  source 1..80: mol_type = other DNA
caaaaagtgacaaagctcgctgtgacagggagattaaaaattacattcctccgaaatgtaagaaagggtaagaaaggaaa

SEQ ID NO: 106597 - DNA, 80 bp, synthetic construct
  source 1..80: mol_type = other DNA
caaccatatgagcagaaagcagttaagctacaggagagatatgaaaagggtattgctgcatatcgtgctaagggcaaaag

SEQ ID NO: 106598 - DNA, 80 bp, synthetic construct
  source 1..80: mol_type = other DNA
atgatgcctgtgcagtgggcttgttttgctaagaatgtgaattctagtacagctcagtattagcttcagtataaaactgt

SEQ ID NO: 106599 - DNA, 80 bp, synthetic construct
  source 1..80: mol_type = other DNA
gttctcctgcctcagcctcctgagtagctgggattacaggcacatgccaccacgctcagctaatttttgtatttttagta

SEQ ID NO: 106600 - DNA, 80 bp, synthetic construct; identical to SEQ ID NO: 20658
  source 1..80: mol_type = other DNA

SEQ ID NO: 106601 - DNA, 80 bp, synthetic construct
  source 1..80: mol_type = other DNA
taataaaattatgcgtatcaaaaaaacaaagaaattccgtgtgtagttcacactcacagcacatctccgtccaggcactt

SEQ ID NO: 106602 - DNA, 80 bp, synthetic construct
  source 1..80: mol_type = other DNA
agcattatctccagattccaagaagttggggtgtgagccagcaatcagtacagaaaagagataccaaaataagtttgagt

SEQ ID NO: 106603 - DNA, 80 bp, synthetic construct
  source 1..80: mol_type = other DNA
ctgagtagctgggattacagacatgcacctgtaatttctactaaaaatacaaaaattagccgggcgtggtggcgcacgcc

SEQ ID NO: 106604 - DNA, 80 bp, synthetic construct; identical to SEQ ID NO: 20659
  source 1..80: mol_type = other DNA

SEQ ID NO: 106605 - DNA, 80 bp, synthetic construct
  source 1..80: mol_type = other DNA
tctctttcccctggtccaagagtggctcaaaagaaggatttttgactggaattggccactttgtgttactttttgaccct

SEQ ID NO: 106606 - DNA, 80 bp, synthetic construct
  source 1..80: mol_type = other DNA
gaggccgttggcacccgtgacctacgacccccttcccgagccccaccgaggtcacagccgtggcctcgtctccccatgcc

SEQ ID NO: 106607 - DNA, 80 bp, synthetic construct
  source 1..80: mol_type = other DNA
gctccaatcgtcagcggcggcggggcgggcagagggccggggatggcaggttcaaccaacgggtgggcacgtcgtcctcg

SEQ ID NO: 106608 - DNA, 80 bp, synthetic construct
  source 1..80: mol_type = other DNA
ggcacttgctgccgcggccttggatgggctgggcccccctcgccgctccgcctcctccacacgcgcggcggccgcggcga

SEQ ID NO: 106609 - DNA, 80 bp, synthetic construct; identical to SEQ ID NO: 20660
  source 1..80: mol_type = other DNA

SEQ ID NO: 106610 - DNA, 80 bp, synthetic construct
  source 1..80: mol_type = other DNA
ttgctcctgggacaggcggtgggaccggggcgtcgccggagacgcccccagcgaagttgggctctccaggtgtgggggtc

SEQ ID NO: 106611 - DNA, 80 bp, synthetic construct
  source 1..80: mol_type = other DNA
ttgaccctgaccgggccgtctcccagttctgaggcccgggtcccactggaactcgcgtctgagccgccgtcccggacccc

SEQ ID NO: 106612 - DNA, 80 bp, synthetic construct
  source 1..80: mol_type = other DNA
ttttttttttcttttttctttgtaaaattttggagaagggaagtcggaacacaaggaaggaccgctcacccgcggactca

SEQ ID NO: 106613 - DNA, 80 bp, synthetic construct
  source 1..80: mol_type = other DNA
atcgactccaccgaggtcatctaccagccgcgccgcaagcgggccaagctcatcggcaagtacctgatgggggacctgct

SEQ ID NO: 106614 - DNA, 80 bp, synthetic construct; identical to SEQ ID NO: 20661
  source 1..80: mol_type = other DNA

SEQ ID NO: 106615 - DNA, 80 bp, synthetic construct
  source 1..80: mol_type = other DNA
tggactccagttaaaatgccctggtagcgaaaccctcctgagaagggagcggcccccaatcccctaagactagccccttg

SEQ ID NO: 106616 - DNA, 80 bp, synthetic construct
  source 1..80: mol_type = other DNA
ggccaggcgaaatgtgatttgtttatcctgtcagaggggaaccctgggctgccaaaaataactgtttgcaccggcttatc

SEQ ID NO: 106617 - DNA, 80 bp, synthetic construct
  source 1..80: mol_type = other DNA
cggggctgccgctgggcatcccggacgcctctgcatctgtgcgcggagaagctcctacctagggcagcactggccggcct

SEQ ID NO: 106618 - DNA, 80 bp, synthetic construct; identical to SEQ ID NO: 20662
  source 1..80: mol_type = other DNA

SEQ ID NO: 106619 - DNA, 80 bp, synthetic construct
  source 1..80: mol_type = other DNA
agtgcagtggcgcgaactgggctcactgcaagctccgcctcccgggttcatgccattctcctgcctcagcctcccgagta

SEQ ID NO: 106620 - DNA, 80 bp, synthetic construct
  source 1..80: mol_type = other DNA
gcgtgcggcctttttttttttttttttttttttttttgagacggagtttcactcttgttgctcaggctggagtgcagtgg

SEQ ID NO: 106621 - DNA, 80 bp, synthetic construct
  source 1..80: mol_type = other DNA
gtcttgaacttctgacctcgtgatccacctgcctcagcctcccaaagtgctgggattaaaggcgtgagccaccgcgcccg

SEQ ID NO: 106622 - DNA, 80 bp, synthetic construct; identical to SEQ ID NO: 20663
  source 1..80: mol_type = other DNA

SEQ ID NO: 106623 - DNA, 80 bp, synthetic construct
  source 1..80: mol_type = other DNA
cacgcctgtaatcccagcactttgggaggctgaggtgggtggatcgcctgaggtcaggagttcgagaccagcctggccaa

SEQ ID NO: 106624 - DNA, 80 bp, synthetic construct
  source 1..80: mol_type = other DNA
ggcgacacagcgagactctgtctcaaaaataaataaataaataaataaataaataaataaataaataaatctggcttgag

SEQ ID NO: 106625 - DNA, 80 bp, synthetic construct
  source 1..80: mol_type = other DNA
tggagacaggcaagaaggttgcaggaacctagtctggcccagtgcctgggagaacgggagggaacacggaggcagggagg

SEQ ID NO: 106626 - DNA, 80 bp, synthetic construct; identical to SEQ ID NO: 20664
  source 1..80: mol_type = other DNA

SEQ ID NO: 106627 - DNA, 80 bp, synthetic construct
  source 1..80: mol_type = other DNA
cgctgcagggaaaaagcctcctttgtgtgtgggaagtttaataaactccgctcagattgtgtctcgcagcgagtgtctgg

SEQ ID NO: 106628 - DNA, 80 bp, synthetic construct
  source 1..80: mol_type = other DNA
ctcaccggcaaaaagtataatcttattagaaataggaaagttccaaaaagcatcaatgagttaaaaagagggctgggcat

SEQ ID NO: 106629 - DNA, 80 bp, synthetic construct
  source 1..80: mol_type = other DNA
aggctgaggcaggagaatcacttgaacccgggaagcagaggttgcggtgagccaagaccatgccattgcactccagcctg

SEQ ID NO: 106630 - DNA, 80 bp, synthetic construct; identical to SEQ ID NO: 20665
  source 1..80: mol_type = other DNA

SEQ ID NO: 106631 - DNA, 80 bp, synthetic construct
  source 1..80: mol_type = other DNA
tgtgtctcaaaaaaacaattaattaaaataaaatcagtgccataggctgtttctggtaggcagtgggttcctagggtgga

SEQ ID NO: 106632 - DNA, 80 bp, synthetic construct
  source 1..80: mol_type = other DNA
cagaaggccgccatgcctccctccccctttccaccccagtgagagtgggctcgaaggcagggagtctgcccgccttgtgg

SEQ ID NO: 106633 - DNA, 80 bp, synthetic construct; identical to SEQ ID NO: 20666
  source 1..80: mol_type = other DNA

SEQ ID NO: 106634 - DNA, 80 bp, synthetic construct
  source 1..80: mol_type = other DNA
gacctatggtaaagaggattttcgcgagctgggagtcagtcctggactttgtaggtctttacatcccaggcggcctttat

SEQ ID NO: 106635 - DNA, 80 bp, synthetic construct
  source 1..80: mol_type = other DNA
ccactgggggttctgggctgtgcacacagtgggcttccggtgcccagccagctggggcaggcctggaatgttggttcctc

SEQ ID NO: 106636 - DNA, 80 bp, synthetic construct
  source 1..80: mol_type = other DNA
tttttttttttttttttttttttggagacagggtctcactgtatcgccgaggctggagtgcagtggcgcaatcatagctc

SEQ ID NO: 106637 - DNA, 80 bp, synthetic construct; identical to SEQ ID NO: 20667
  source 1..80: mol_type = other DNA

SEQ ID NO: 106638 - DNA, 80 bp, synthetic construct
  source 1..80: mol_type = other DNA
atggtctcgatctcctgaccttgtgatccgcccgcctcggcctcccaaagtcctgggattacaggcttgagtcactgtgc

SEQ ID NO: 106639 - DNA, 80 bp, synthetic construct
  source 1..80: mol_type = other DNA
tttttttttttttttttgagatggagtctcgctctgtcacccaggctggagtgcagtggcgtgatcttggctcactgcaa

SEQ ID NO: 106640 - DNA, 80 bp, synthetic construct
  source 1..80: mol_type = other DNA
ctgcctgcctcggcctcccaaagtgctggggttacaggtgtgagccaccgcacccggcaaagttcacctttttaaagtgt

SEQ ID NO: 106641 - DNA, 80 bp, synthetic construct
  source 1..80: mol_type = other DNA
tggattggcctgtcctgaacatttcacacgagtggtgtcacacaccgcgtggccttttgcgtccggcttgtctcacggag

SEQ ID NO: 106642 - DNA, 80 bp, synthetic construct; identical to SEQ ID NO: 20668
  source 1..80: mol_type = other DNA

SEQ ID NO: 106643 - DNA, 80 bp, synthetic construct
  source 1..80: mol_type = other DNA
tgagcttgagtggcgtttatgactctccttcctatttcctgtcctgctaatcaacaagtcagctaaacagtccatgctgc

SEQ ID NO: 106644 - DNA, 80 bp, synthetic construct
  source 1..80: mol_type = other DNA
ggaagcctggcgatctagagaagctgatgtgcacccatcatcccggaggtgactgccaccaggcgggggtggctccaccc

SEQ ID NO: 106645 - DNA, 80 bp, synthetic construct; identical to SEQ ID NO: 20669
  source 1..80: mol_type = other DNA

SEQ ID NO: 106646 - DNA, 80 bp, synthetic construct
  source 1..80: mol_type = other DNA
gcctcactgcccctcctcagggttaggactgtgctggagcctgggtgggtgtggggtggtccctgcacaggcagcaggag

SEQ ID NO: 106647 - DNA, 80 bp, synthetic construct
  source 1..80: mol_type = other DNA
tgcgtccgagcatctggcctctgctgtctgaaaacagcaccttccccgccccccggccaccgcatctcctctgaatagaa

SEQ ID NO: 106648 - DNA, 80 bp, synthetic construct
  source 1..80: mol_type = other DNA
cccggggcctttgccgagcccagcctcaccctcagcgtccccctcaatgccctgggtgcctgccaggctgtggacacagg

SEQ ID NO: 106649 - DNA, 80 bp, synthetic construct
  source 1..80: mol_type = other DNA
cagggcaccgggcacagccaggggccggaaccagttgctcactggctccgcttctgggggactgtgtccctctgtgcccc

SEQ ID NO: 106650 - DNA, 80 bp, synthetic construct; identical to SEQ ID NO: 20670
  source 1..80: mol_type = other DNA

SEQ ID NO: 106651 - DNA, 80 bp, synthetic construct
  source 1..80: mol_type = other DNA
aggcgcccatcaccacgcccggctaatttttgtatttttagtagagacaaggtttcaccatgttggccaggctggtttcg

SEQ ID NO: 106652 - DNA, 80 bp, synthetic construct
  source 1..80: mol_type = other DNA
actgtacaactcattcgttcacagtgtacaattcagtggcattaagtacattcacacggctgtgcaaccactacttctaa

SEQ ID NO: 106653 - DNA, 80 bp, synthetic construct
  source 1..80: mol_type = other DNA
actcacgagagcaagagatccagaccatcctggccaacatggtgaaaccccatctctactaaaaatacaaaaattagctg

SEQ ID NO: 106654 - DNA, 80 bp, synthetic construct; identical to SEQ ID NO: 20671
  source 1..80: mol_type = other DNA

SEQ ID NO: 106655 - DNA, 80 bp, synthetic construct
  source 1..80: mol_type = other DNA
aaaaaaaaaaaaagtgcatcacacactgtgtgtcctttagtgtctcactgtgacatcctcaaggtgcagctaggctgtgg

SEQ ID NO: 106656 - DNA, 80 bp, synthetic construct
  source 1..80: mol_type = other DNA
ctcgagtcagagcctcactggtttttgtggctgagtcttgttgagtgcgtggatgggctgtgctgatcctcgtctgtgga

SEQ ID NO: 106657 - DNA, 80 bp, synthetic construct; identical to SEQ ID NO: 20672
  source 1..80: mol_type = other DNA

SEQ ID NO: 106658 - DNA, 80 bp, synthetic construct
  source 1..80: mol_type = other DNA
cctggctaatttttgtatttttagtagagacagggtttcgccgtgttgctcaggctggtctcgaactcctgagctcaggt

SEQ ID NO: 106659 - DNA, 80 bp, synthetic construct
  source 1..80: mol_type = other DNA
acaggcgggtgggtgtggcaggaccccacaatgtctctttctgtggcgtctccttcttcgcctgccccttcctatgggcc

SEQ ID NO: 106660 - DNA, 80 bp, synthetic construct
  source 1..80: mol_type = other DNA
agtagtctggtttctaggaagcaaaactgttactgagttacaaagctcaattaagagtgtcctttgggaggccgaggcgg

SEQ ID NO: 106661 - DNA, 80 bp, synthetic construct
  source 1..80: mol_type = other DNA
ggaggctgaggcagggaaatcacttgaacctgggaggcagaggttgcagtgagctgagatcgggccaccgtgctccagcc

SEQ ID NO: 106662 - DNA, 80 bp, synthetic construct; identical to SEQ ID NO: 20673
  source 1..80: mol_type = other DNA

SEQ ID NO: 106663 - DNA, 80 bp, synthetic construct
  source 1..80: mol_type = other DNA
gttacggcacaaaaatgtcatccagctggtggatgtgttatacaacgaagagaagcagaaaatatatcctttccggtgtt

SEQ ID NO: 106664 - DNA, 80 bp, synthetic construct
  source 1..80: mol_type = other DNA
tgaaaggggccctgagccctggcccctgtgtcttgggcccgtggggtgtcaagtcccttttttctcagagtctcctccca

SEQ ID NO: 106665 - DNA, 80 bp, synthetic construct; identical to SEQ ID NO: 20674
  source 1..80: mol_type = other DNA

SEQ ID NO: 106666 - DNA, 80 bp, synthetic construct
  source 1..80: mol_type = other DNA
gcccctgggccttttcagaggggtggctgagggcagggtgggccctggtcccgaggaggggcaaggtgggtgcagagggt

SEQ ID NO: 106667 - DNA, 80 bp, synthetic construct
  source 1..80: mol_type = other DNA
tgtgccaggcccacgggtgcgtgcgcggggcaggggccagggtggggcgggggccgggggccaggcagggcaggctcctt

SEQ ID NO: 106668 - DNA, 80 bp, synthetic construct
  source 1..80: mol_type = other DNA
gaggttcacgccattcttctgcctcagcttcccgagtagctgggattacaggcgcccgccaccacgcccggctaattttt

SEQ ID NO: 106669 - DNA, 80 bp, synthetic construct
  source 1..80: mol_type = other DNA
gggtcccccatgtgtggcatccacaggcagggctgctgccaacctcccgcctccatctttgctgggcctgctgcctgagg

SEQ ID NO: 106670 - DNA, 80 bp, synthetic construct; identical to SEQ ID NO: 20675
  source 1..80: mol_type = other DNA

SEQ ID NO: 106671 - DNA, 80 bp, synthetic construct
  source 1..80: mol_type = other DNA
gtgtgctgcccgcaggtacttctgtcagctgattgacggcctggagtacctgcatagccagggcattgtgcacaaggaca

SEQ ID NO: 106672 - DNA, 80 bp, synthetic construct
  source 1..80: mol_type = other DNA
ggcggacgacacctgccggaccagccagggctccccggctttccagccgcccgagattgccaacggcctggacaccttct

SEQ ID NO: 106673 - DNA, 80 bp, synthetic construct; identical to SEQ ID NO: 20676
  source 1..80: mol_type = other DNA

SEQ ID NO: 106674 - DNA, 80 bp, synthetic construct
  source 1..80: mol_type = other DNA
agaggtgtccttgagtccacagggcctctggtccagcagccacgggacgcctctgtccctggggtagagctggggctcct

SEQ ID NO: 106675 - DNA, 80 bp, synthetic construct
  source 1..80: mol_type = other DNA
cccgctctctgacctgctgaaaggtgggagcctcatccctctgcccgcagccccagggaggcggggcttttgtgcagaaa

SEQ ID NO: 106676 - DNA, 80 bp, synthetic construct
  source 1..80: mol_type = other DNA
ccagagggcagtgctgccctgcgcctcccccagccccaccctcgggggctccctggcttgcagggtctgtcagggttgtc

SEQ ID NO: 106677 - DNA, 80 bp, synthetic construct; identical to SEQ ID NO: 20677
  source 1..80: mol_type = other DNA

SEQ ID NO: 106678 - DNA, 80 bp, synthetic construct
  source 1..80: mol_type = other DNA
gctgcagggaggccggccatgtgggcagctggttgagcgggcgctagagcagggcgtggtgggggtgccaggctgggctg

SEQ ID NO: 106679 - DNA, 80 bp, synthetic construct
  source 1..80: mol_type = other DNA
acagctggtcccaaacactggcgagagcctctctttttcccctcctcctggggctcccagcagcagggtgtggctgggat

SEQ ID NO: 106680 - DNA, 80 bp, synthetic construct
  source 1..80: mol_type = other DNA
cacccactgagaccggctctgggagtgggagtgtccggacccctgaggcgctggtgctgattgtgccttgggggtctctg

SEQ ID NO: 106681 - DNA, 80 bp, synthetic construct; identical to SEQ ID NO: 20678
  source 1..80: mol_type = other DNA

SEQ ID NO: 106682 - DNA, 80 bp, synthetic construct
  source 1..80: mol_type = other DNA
aaacatcctccggctgaagcaccagtgcccatcccaccgagcccagacaccaaggaccggtggcgcagcatgactgtggt

SEQ ID NO: 106683 - DNA, 80 bp, synthetic construct
  source 1..80: mol_type = other DNA
tgcctgcctgtctgcaacaaggacagcttctgccctctggtggccaatcccacgtccccaaagcctccagcccacctgca

SEQ ID NO: 106684 - DNA, 80 bp, synthetic construct
  source 1..80: mol_type = other DNA
agcaggcgggggagccccagggtcgggggagggtaggtgagagtcagggtgcagggtggcccctcagacagctggcatga

SEQ ID NO: 106685 - DNA, 80 bp, synthetic construct; identical to SEQ ID NO: 20679
  source 1..80: mol_type = other DNA

SEQ ID NO: 106686 - DNA, 80 bp, synthetic construct
  source 1..80: mol_type = other DNA
aggggccggcctgagaaggggggtacgccaggcaggttgggatgtgaggacccagtgcacagggtccacccccgggcccg

SEQ ID NO: 106687 - DNA, 80 bp, synthetic construct
  source 1..80: mol_type = other DNA
gtacagtgtctgggggccccccaggaggatgcagcatgtgggggccccccaggagggtacagcgtgtgtggggcccccag

SEQ ID NO: 106688 - DNA, 80 bp, synthetic construct
  source 1..80: mol_type = other DNA
tgaccccaggcccagggtcttctgcctttcagagccctggtgccctgagacgggcagccaggcaaatcccaggcaggagg

SEQ ID NO: 106689 - DNA, 80 bp, synthetic construct; identical to SEQ ID NO: 20680
  source 1..80: mol_type = other DNA

SEQ ID NO: 106690 - DNA, 80 bp, synthetic construct
  source 1..80: mol_type = other DNA
ctgcagagcccccttgcgttggggcaggacagcccggcgccctcgggtcaggccatcctctgcgctctgccggggctgct

SEQ ID NO: 106691 - DNA, 80 bp, synthetic construct
  source 1..80: mol_type = other DNA
gcccgctgatgcagagctggggcaccttgtccacagggtctgccccaccagagacgggctgggcccaagctcagacctat

SEQ ID NO: 106692 - DNA, 80 bp, synthetic construct
  source 1..80: mol_type = other DNA
tagctgggattacaagtgcgcgccagcatgcccggctaatttttgtatgtttagtagagacgggggtttcaccatgttgg

SEQ ID NO: 106693 - DNA, 80 bp, synthetic construct; identical to SEQ ID NO: 20681
  source 1..80: mol_type = other DNA

SEQ ID NO: 106694 - DNA, 80 bp, synthetic construct
  source 1..80: mol_type = other DNA
ggcagccccaggcctgtgggtttcaccagggtgctggtgatggttggtggctagcagggactgggggcagctgggggccc

SEQ ID NO: 106695 - DNA, 80 bp, synthetic construct
  source 1..80: mol_type = other DNA
acgggagggtcctgccttgtcagcttgcctcctactcgtgaggttcctgcagtcagtacctgggtggggtcccacctgcg

SEQ ID NO: 106696 - DNA, 80 bp, synthetic construct
  source 1..80: mol_type = other DNA
gctgtaagtgcgtccccgtggtgggggccagccaggtccctgtggctctggggttgcgcccctcagctcaggccacactt

SEQ ID NO: 106697 - DNA, 80 bp, synthetic construct
  source 1..80: mol_type = other DNA
gctccgccagcagcaagatccgccggctgtcggcctgcaagcagcagtgaggctggccgcctgcaggtggggcgcggcgg

SEQ ID NO: 106698 - DNA, 80 bp, synthetic construct; identical to SEQ ID NO: 20682
  source 1..80: mol_type = other DNA

SEQ ID NO: 106699 - DNA, 80 bp, synthetic construct
  source 1..80: mol_type = other DNA
tggctctgccggggtgccgcaggctctgagccagctgccaagtatggctgaggctgagtcgtgccggacgctgccctgtc

SEQ ID NO: 106700 - DNA, 80 bp, synthetic construct
  source 1..80: mol_type = other DNA
ttttgggggccaccgcctgagttacatgtctgtcccccaaatgggtgcccacagcccatccaccagcgtcagagcccgcc

SEQ ID NO: 106701 - DNA, 80 bp, synthetic construct
  source 1..80: mol_type = other DNA
aggctgacctcttccgtcttccttccaccctgcagcccgtgtccaggagccccgccaggtgcccgcgccaggccctcagt

SEQ ID NO: 106702 - DNA, 80 bp, synthetic construct; identical to SEQ ID NO: 20683
  source 1..80: mol_type = other DNA

SEQ ID NO: 106703 - DNA, 80 bp, synthetic construct
  source 1..80: mol_type = other DNA
ttggttccattttctttttttctttttttttttaagaaaaaataaaaggtggatttgagctgtggctgtgaggggtgttt

SEQ ID NO: 106704 - DNA, 80 bp, synthetic construct
  source 1..80: mol_type = other DNA
aagcaggagtgtgcggtcaatatttatatcatccagaaaagaaaaacacgagaaacgccatcgcgggatggtgcagacgc

SEQ ID NO: 106705 - DNA, 80 bp, synthetic construct; identical to SEQ ID NO: 20684
  source 1..80: mol_type = other DNA

SEQ ID NO: 106706 - DNA, 80 bp, synthetic construct
  source 1..80: mol_type = other DNA
ttgggggtgtgtttgggctcaggatctgggtctgacgctgggatctgaggactttctgggtttggaactgggtgggggag

SEQ ID NO: 106707 - DNA, 80 bp, synthetic construct
  source 1..80: mol_type = other DNA
ggtggcatgtgctgggattgccaatgcggagctgtgaatggggtcagggtggggctgaggcagtaccagatcttccgcgc

SEQ ID NO: 106708 - DNA, 80 bp, synthetic construct
  source 1..80: mol_type = other DNA
agccgatcgggccggggctggggtctggcggcccagcccccggggagcgtggggcgtggccagaaaccggcgctcgcggc

SEQ ID NO: 106709 - DNA, 80 bp, synthetic construct; identical to SEQ ID NO: 20685
  source 1..80: mol_type = other DNA

SEQ ID NO: 106710 - DNA, 80 bp, synthetic construct
  source 1..80: mol_type = other DNA
tctggctcgctcctgctctttctcaaacatggcgcggggccgggggcgcaggtggcggcgccggggcccgggccgggctc

SEQ ID NO: 106711 - DNA, 80 bp, synthetic construct
  source 1..80: mol_type = other DNA
gtccggggctgccctctggggtgtgagtgggcgagggccaggggcggagagtgcgaggccggcggggactggcagagccg

SEQ ID NO: 106712 - DNA, 80 bp, synthetic construct
  source 1..80: mol_type = other DNA
cgtccagtgggagtcgggggcgacgtgtggtgagacccctgggtccgcaggccgccctgactcccgcccggctcgacccg

SEQ ID NO: 106713 - DNA, 80 bp, synthetic construct
  source 1..80: mol_type = other DNA
cttgaacgtttgctcattctgcgggttttggaaattttgggaacgactgtgaattgattaaacgctttttatttcctcga

SEQ ID NO: 106714 - DNA, 80 bp, synthetic construct; identical to SEQ ID NO: 20686
  source 1..80: mol_type = other DNA

SEQ ID NO: 106715 - DNA, 80 bp, synthetic construct
  source 1..80: mol_type = other DNA
taaatgcatacactattgtataattacattatttaatcaccacaagtaaactcccaggagtagtggcatttgccccactt

SEQ ID NO: 106716 - DNA, 80 bp, synthetic construct
  source 1..80: mol_type = other DNA
cagtcgtctgatgagcaattggtctttattatccactttggattctgtcctcatgatttgagtatcagataggcttcatt

SEQ ID NO: 106717 - DNA, 80 bp, synthetic construct; identical to SEQ ID NO: 20687
  source 1..80: mol_type = other DNA

SEQ ID NO: 106718 - DNA, 80 bp, synthetic construct
  source 1..80: mol_type = other DNA
tccacccttaaaaaacattctgaaaaaggtcaaatgctttttatttcctctgtaacttggcttcccttttaaagacttgc

SEQ ID NO: 106719 - DNA, 80 bp, synthetic construct
  source 1..80: mol_type = other DNA
ccatttcataactttttttctttgaaaacgtgcccccaatccaactcttctatgaatgcctcttgaatgtctcctccttt

SEQ ID NO: 106720 - DNA, 80 bp, synthetic construct
  source 1..80: mol_type = other DNA
tagaacaacacttagcagcttatgattggggccatctctgagtatcctaccagggatctcatttctcattactgcagacc

SEQ ID NO: 106721 - DNA, 80 bp, synthetic construct; identical to SEQ ID NO: 20688
  source 1..80: mol_type = other DNA

SEQ ID NO: 106722 - DNA, 80 bp, synthetic construct
  source 1..80: mol_type = other DNA
aaataatcaggaaaagttgtatggcgtgttgaaagcaattggttatttgtcctaccttcaccagcagttatgcagaaaat

SEQ ID NO: 106723 - DNA, 80 bp, synthetic construct
  source 1..80: mol_type = other DNA
ttctgattggttggtacccttgtagtgccagttgttaaatatttttaatatcatttctatagggaggcattagtattcaa

SEQ ID NO: 106724 - DNA, 80 bp, synthetic construct
  source 1..80: mol_type = other DNA
aagggaggaaacaaggcttttactgactgactggcaagttactcttcagagttaggttccttattctgtactgtggaatt

SEQ ID NO: 106725 - DNA, 80 bp, synthetic construct; identical to SEQ ID NO: 20689
  source 1..80: mol_type = other DNA

SEQ ID NO: 106726 - DNA, 80 bp, synthetic construct
  source 1..80: mol_type = other DNA
gaaaagtgaattctaaaggtggaagggagggggaatgattaaagccttaaagttctcaaggaaaaggtcaattttttttt

SEQ ID NO: 106727 - DNA, 80 bp, synthetic construct
  source 1..80: mol_type = other DNA
agagaggaattgacataaaaataatcaagaggaagataaatcttgttcctgtgaggagggccgctcatgtagggaagacc

SEQ ID NO: 106728 - DNA, 80 bp, synthetic construct
  source 1..80: mol_type = other DNA
atatgttcatgtgtaataaatggaattttgaaaatgccattatcctatggatggcccttctgatgtgagaacgtgtctct

SEQ ID NO: 106729 - DNA, 80 bp, synthetic construct; identical to SEQ ID NO: 20690
  source 1..80: mol_type = other DNA

SEQ ID NO: 106730 - DNA, 80 bp, synthetic construct
  source 1..80: mol_type = other DNA
ttgctttccaggtaagtttcttatggctacccttcttcatcatgaagaaaattggttggtagacttgtaattattcatct

SEQ ID NO: 106731 - DNA, 80 bp, synthetic construct
  source 1..80: mol_type = other DNA
tgaaatttcttgaagggttgcaagaatatgctacatattctatctgtcttgtctcgtttaattctctcttctctcttttt

SEQ ID NO: 106732 - DNA, 80 bp, synthetic construct
  source 1..80: mol_type = other DNA
catttgttcccagatacaggtgaccagtgctcagaagataactgtaggttttgataacatcggctctaccccaagattct

SEQ ID NO: 106733 - DNA, 80 bp, synthetic construct; identical to SEQ ID NO: 20691
  source 1..80: mol_type = other DNA

SEQ ID NO: 106734 - DNA, 80 bp, synthetic construct
  source 1..80: mol_type = other DNA
tagagccacttcagcaggaaagtttcctttcccttttttgcaaaccatgagaatttgcttcagattgccttgattacagt

SEQ ID NO: 106735 - DNA, 80 bp, synthetic construct
  source 1..80: mol_type = other DNA
taaaagttacataagcacaggactgaaaatttgtattagagaaaggaaaaaaaccatcaccagccattattaacatttgg

SEQ ID NO: 106736 - DNA, 80 bp, synthetic construct
  source 1..80: mol_type = other DNA
ccaacatgatgaaaccctgtctctactaaaaataacaaaaaattagctggacgtagtggcaggcacctgtaatcccagct

SEQ ID NO: 106737 - DNA, 80 bp, synthetic construct
  source 1..80: mol_type = other DNA
tctatttcagcagtttatgaaagctaataaaagtgtttaaattgacaaacagcttcagtttacagaggaaagagcttcag

SEQ ID NO: 106738 - DNA, 80 bp, synthetic construct; identical to SEQ ID NO: 20692
  source 1..80: mol_type = other DNA

SEQ ID NO: 106739 - DNA, 80 bp, synthetic construct
  source 1..80: mol_type = other DNA
tgtaaagggtgggctcagagaattatgggccttgaaaatcaggagagtggttttaatgtggaaaaagaatgtctaattgt

SEQ ID NO: 106740 - DNA, 80 bp, synthetic construct
  source 1..80: mol_type = other DNA
ctcagatgacacctttttctcagtgaggcttatcctgccaccttttaaaatattgtcatcatcctacagtgctttccttc

SEQ ID NO: 106741 - DNA, 80 bp, synthetic construct; identical to SEQ ID NO: 20693
  source 1..80: mol_type = other DNA

SEQ ID NO: 106742 - DNA, 80 bp, synthetic construct
  source 1..80: mol_type = other DNA
gattaaaaaaaaatggaacctagttggaaatgggagagcaccttaagcaaagaaatggctactagcatctagcattcacc

SEQ ID NO: 106743 - DNA, 80 bp, synthetic construct
  source 1..80: mol_type = other DNA
gcaggttcatgctatttttcccccacctctcttagtaaagatgtatatattcagaattacttgtgatcttctggttgtat

SEQ ID NO: 106744 - DNA, 80 bp, synthetic construct
  source 1..80: mol_type = other DNA
tggagctccctgatggctatccttttaaatgcttttcctgttgtttttctcaatgaaccaaacactggtgcagttgtatc

SEQ ID NO: 106745 - DNA, 80 bp, synthetic construct
  source 1..80: mol_type = other DNA
agtctaatcagtgtatctgtgactcacttttcaaaagaggatagttcctaatttacctgatcgttgtgaagatagtgtac

SEQ ID NO: 106746 - DNA, 80 bp, synthetic construct; identical to SEQ ID NO: 20694
  source 1..80: mol_type = other DNA

SEQ ID NO: 106747 - DNA, 80 bp, synthetic construct
  source 1..80: mol_type = other DNA
gccaaatatagtctaaatatccctaggattcatggcttcaagatgagcagtatcttgttgctcctgtattatacgagaaa

SEQ ID NO: 106748 - DNA, 80 bp, synthetic construct
  source 1..80: mol_type = other DNA
aagtttagctgaggaaagctttagaagttgaacacaatacttagctctgagttttctggtaaccaaggcaagtaaggaag

SEQ ID NO: 106749 - DNA, 80 bp, synthetic construct
  source 1..80: mol_type = other DNA
ctgaggcttcccctttaacacgtattgagggttcaatttagtgctgctgcctccatctttcttctccagtttaagtctct

SEQ ID NO: 106750 - DNA, 80 bp, synthetic construct; identical to SEQ ID NO: 20695
  source 1..80: mol_type = other DNA

SEQ ID NO: 106751 - DNA, 80 bp, synthetic construct
  source 1..80: mol_type = other DNA
attcatggaaaagataggcacgtacattagcatgagggcattctgtggttagaagcattctgatttcattgggaaaaaca

SEQ ID NO: 106752 - DNA, 80 bp, synthetic construct
  source 1..80: mol_type = other DNA
tccttgttctcaccaccaagactgaacctccttatttttgttcatttgcttcaggaaaaccattccatctagatttccta

SEQ ID NO: 106753 - DNA, 80 bp, synthetic construct; identical to SEQ ID NO: 20696
  source 1..80: mol_type = other DNA

SEQ ID NO: 106754 - DNA, 80 bp, synthetic construct
  source 1..80: mol_type = other DNA
ttccaaatcaaactataatgtgctctaattgggtctctttgttcagcacgtggttgttgatttgagtactttctccagtt

SEQ ID NO: 106755 - DNA, 80 bp, synthetic construct
  source 1..80: mol_type = other DNA
tttgggaaaaaaattacaaatcaggggccagagtctggtcatgtttgtcagtgaggaaagacaatttctgattgccagtc

SEQ ID NO: 106756 - DNA, 80 bp, synthetic construct
  source 1..80: mol_type = other DNA
ttttcttccctcttatttcgatgcatgtataaacttgagcctttctgctctcacattctttctccccatgatcataattg

SEQ ID NO: 106757 - DNA, 80 bp, synthetic construct; identical to SEQ ID NO: 20697
  source 1..80: mol_type = other DNA

SEQ ID NO: 106758 - DNA, 80 bp, synthetic construct
  source 1..80: mol_type = other DNA
atttcataattctgcaagatagtcttcggtgttgtatcatcagttatccaaggtataaataacatcaagacccttatgcc

SEQ ID NO: 106759 - DNA, 80 bp, synthetic construct
  source 1..80: mol_type = other DNA
tacagtacatctcaagcctaagttttcatatacacatagtttagtctcaaagggcaaatgtttccctgaaaggagttcag

SEQ ID NO: 106760 - DNA, 80 bp, synthetic construct
  source 1..80: mol_type = other DNA
actgcaaccacaatttaactgctttgctttggtattttgtttgacaagggagatgaatgtttcagatgagacggagtctc

SEQ ID NO: 106761 - DNA, 80 bp, synthetic construct; identical to SEQ ID NO: 20698
  source 1..80: mol_type = other DNA

SEQ ID NO: 106762 - DNA, 80 bp, synthetic construct
  source 1..80: mol_type = other DNA
ttggtaaaaccttttttcccccagtgtacaatcaccttcatcataaatcaagaggttgtatatgtgagggtctgtttctc

SEQ ID NO: 106763 - DNA, 80 bp, synthetic construct
  source 1..80: mol_type = other DNA
cttgtcagttcccactgaataaaaaaaccctgtggggattctgatttgattttattgaatctacagatcactttatggaa

SEQ ID NO: 106764 - DNA, 80 bp, synthetic construct
  source 1..80: mol_type = other DNA
aggtttattcctagtttttagatttttaaaaaacgttttctatttattactggtttaagaatgattttttaatttaattt

SEQ ID NO: 106765 - DNA, 80 bp, synthetic construct; identical to SEQ ID NO: 20699
  source 1..80: mol_type = other DNA

SEQ ID NO: 106766 - DNA, 80 bp, synthetic construct
  source 1..80: mol_type = other DNA
aatcatgaatagctgttgaattttatcagtttttttgtttttgtttacatcacctaaactgccaaactcccttactgttt

SEQ ID NO: 106767 - DNA, 80 bp, synthetic construct
  source 1..80: mol_type = other DNA
caccacacctggctcaaacttttattttggcatcttttgtacaatgtttttgtatatcctctacctaaaatgactttcct

SEQ ID NO: 106768 - DNA, 80 bp, synthetic construct
  source 1..80: mol_type = other DNA
tcctcctaaaggttttttctttcttcctacacaggttacattcactgttgtgttctgagaaaaggtgttcaggccttgct

SEQ ID NO: 106769 - DNA, 80 bp, synthetic construct; identical to SEQ ID NO: 20700
  source 1..80: mol_type = other DNA

SEQ ID NO: 106770 - DNA, 80 bp, synthetic construct
  source 1..80: mol_type = other DNA
tttgtcctacgtgaggggttgtggggagtaggggtggaaatcactgtagattatcaagtaatcctttttttctttgtgta

SEQ ID NO: 106771 - DNA, 80 bp, synthetic construct
  source 1..80: mol_type = other DNA
tacacactgggtgtgtccctacactgttaatttgggttggaactgaaaatatactttctgtgtgtgcctactgctactgt

SEQ ID NO: 106772 - DNA, 80 bp, synthetic construct
  source 1..80: mol_type = other DNA
aacattagctctgattctctgtctagcatctagaccagagactggcacgtaataggagctccaaagaaatacttgttgaa

SEQ ID NO: 106773 - DNA, 80 bp, synthetic construct
  source 1..80: mol_type = other DNA
taagttaagtgacttcctcaggattactcagtgcctgactggcaaagataggattttaacttaagtttttctgtctctga

SEQ ID NO: 106774 - DNA, 80 bp, synthetic construct; identical to SEQ ID NO: 20701
  source 1..80: mol_type = other DNA

SEQ ID NO: 106775 - DNA, 80 bp, synthetic construct
  source 1..80: mol_type = other DNA
tatacagctttacttcctgccctttagtagtaggaccattcccttgtccttaaacatgcttctaaaataccagttttaat

SEQ ID NO: 106776 - DNA, 80 bp, synthetic construct
  source 1..80: mol_type = other DNA
attgatggattaaaagatactttttaaaggctctgactcttctaaaatgtgttgttaaactcctcagatctgctaaccag

SEQ ID NO: 106777 - DNA, 80 bp, synthetic construct
  source 1..80: mol_type = other DNA
gactggaaaatgaagataatgtggaaaaacaagagcttgtgaatttgggagtgccctgttcttttaagatgtgatgtggg

SEQ ID NO: 106778 - DNA, 80 bp, synthetic construct; identical to SEQ ID NO: 20702
  source 1..80: mol_type = other DNA

SEQ ID NO: 106779 - DNA, 80 bp, synthetic construct
  source 1..80: mol_type = other DNA
aagggggcatgtgttgagaatggagaaaaggggtaaggcagattactcagaagaactggggtagaagaataggttggatg

SEQ ID NO: 106780 - DNA, 80 bp, synthetic construct
  source 1..80: mol_type = other DNA
atgtttgtaatatttggaaatactctcactgcgaagaaaagtatagttgtgctgtagtgggtagggtgaggaaaataagg

SEQ ID NO: 106781 - DNA, 80 bp, synthetic construct
  source 1..80: mol_type = other DNA
gatgtaccaaagggccaagtgcaaagtaagtttgggaagtttagtgtcatataaaaactaataaagaaagggtggtactc

SEQ ID NO: 106782 - DNA, 80 bp, synthetic construct; identical to SEQ ID NO: 20703
  source 1..80: mol_type = other DNA

SEQ ID NO: 106783 - DNA, 80 bp, synthetic construct
  source 1..80: mol_type = other DNA
agcttttctagcaagacatatgggcttgtgaattaaccctgggtagccctggcattagatagaattaatagtgcttccat

SEQ ID NO: 106784 - DNA, 80 bp, synthetic construct
  source 1..80: mol_type = other DNA
ctcatgtcacttcctttggtactaactgtcaccatgctaacatctgcaaactttgaaaattctgatttattctgcaatat

SEQ ID NO: 106785 - DNA, 80 bp, synthetic construct; identical to SEQ ID NO: 20704
  source 1..80: mol_type = other DNA

SEQ ID NO: 106786 - DNA, 80 bp, synthetic construct
  source 1..80: mol_type = other DNA
gtatatgcaaatattccaaaatctgaaaaaaatcccaaatccaaaacacttctggtcctgagcattttgcatgagggata

SEQ ID NO: 106787 - DNA, 80 bp, synthetic construct
  source 1..80: mol_type = other DNA
catctcaagattaagaaagctatgcccactgttaaagactggggcatggaaacaaagttggacagtgtagtagaaaggtc

SEQ ID NO: 106788 - DNA, 80 bp, synthetic construct
  source 1..80: mol_type = other DNA
tagtggtatagcaaatagttgcgtaggtttcactcgtgggctggtgataatatagtgaggattcacatccgcctgtaatc

SEQ ID NO: 106789 - DNA, 80 bp, synthetic construct; identical to SEQ ID NO: 20705
  source 1..80: mol_type = other DNA

SEQ ID NO: 106790 - DNA, 80 bp, synthetic construct
  source 1..80: mol_type = other DNA
tagttagcatcttgaacaatttaaatttgatcatcttacttggtatgccagccactaaggatgaaatcctgccactgaga

SEQ ID NO: 106791 - DNA, 80 bp, synthetic construct
  source 1..80: mol_type = other DNA
ttaattatctgtttaatgcctttcccttccaccctagtgaactactcaagtgcaaataccttgtcttactcatctctgca

SEQ ID NO: 106792 - DNA, 80 bp, synthetic construct
  source 1..80: mol_type = other DNA
ccatgtatatgcgtttaaaaatttaaaacctagttgaataaaaggttggggggggcagtatccaggggccaaatctatct

SEQ ID NO: 106793 - DNA, 80 bp, synthetic construct; identical to SEQ ID NO: 20706
  source 1..80: mol_type = other DNA

SEQ ID NO: 106794 - DNA, 80 bp, synthetic construct
  source 1..80: mol_type = other DNA
gaaaggagaagtacagagtgtatttttcataatgttacttaaattctgtagacatgaaactagatataaaacccttatgt

SEQ ID NO: 106795 - DNA, 80 bp, synthetic construct
  source 1..80: mol_type = other DNA
gtgtttctgtattttaacttcagtgataataaaagctgtgagtagtgcctcttctcatcagtaatgttatgcaggagggc

SEQ ID NO: 106796 - DNA, 80 bp, synthetic construct
  source 1..80: mol_type = other DNA
aaatcttcattaaatgattttctaaaccagttattgctggaaatgagaatggaaaaacattgcatacctacaattatatt

SEQ ID NO: 106797 - DNA, 80 bp, synthetic construct; identical to SEQ ID NO: 20707
  source 1..80: mol_type = other DNA

SEQ ID NO: 106798 - DNA, 80 bp, synthetic construct
  source 1..80: mol_type = other DNA
atatttgggagacattgttttagcaaatatttttctgatcactatctaaggagccaggattcagagatgtgaaaaacaaa

SEQ ID NO: 106799 - DNA, 80 bp, synthetic construct
  source 1..80: mol_type = other DNA
ggcaaagatcctgttgaaatagggtcttaaaggatgagtcagataagaagataggtttaaactagacagagagatggtat

SEQ ID NO: 106800 - DNA, 80 bp, synthetic construct
  source 1..80: mol_type = other DNA
gtgatctgagaactgggagagtattcagggcaatattttttatgtatagcggttaccacattgtattacagtgttctcct

SEQ ID NO: 106801 - DNA, 80 bp, synthetic construct; identical to SEQ ID NO: 20708
  source 1..80: mol_type = other DNA

SEQ ID NO: 106802 - DNA, 80 bp, synthetic construct
  source 1..80: mol_type = other DNA
tccttaggaaatcatacccagacagccatcaccatcacaccttgtcatgaataattactgtctcttttagcagtctttat

SEQ ID NO: 106803 - DNA, 80 bp, synthetic construct
  source 1..80: mol_type = other DNA
aaccaagaaacagctacttgagggagaacctgacattcctgaatttgagttgagcaagtgagttgggagtctgcagggcc

SEQ ID NO: 106804 - DNA, 80 bp, synthetic construct
  source 1..80: mol_type = other DNA
cccattccagtggcatagcatagatggccttaattctctcaacaacaatgtgtgacagcatgcacgaagttgtcaaccag

SEQ ID NO: 106805 - DNA, 80 bp, synthetic construct; identical to SEQ ID NO: 20709
  source 1..80: mol_type = other DNA

SEQ ID NO: 106806 - DNA, 80 bp, synthetic construct
  source 1..80: mol_type = other DNA
tagccactccttttctaggtagagtggaccttgctgttcacgtcatagatggccattccgtgtacctagactccttttta

SEQ ID NO: 106807 - DNA, 80 bp, synthetic construct
  source 1..80: mol_type = other DNA
attgacagaaatgactaatacaggtatctggcctcaaggagtttacagtttcataggagaaagaaaaacaaaactagcaa

SEQ ID NO: 106808 - DNA, 80 bp, synthetic construct
  source 1..80: mol_type = other DNA
ggcatgaagctagtattttgctgccagtcatttctgtagttaggttgcctatgtggttggagcatgtatgtattgttaca

SEQ ID NO: 106809 - DNA, 80 bp, synthetic construct
  source 1..80: mol_type = other DNA
ctacacttaatgggtggtagtgttttcacacattgcttctcaaaggaggagtatgtgaatgtttagtttgggcctggtaa

SEQ ID NO: 106810 - DNA, 80 bp, synthetic construct; identical to SEQ ID NO: 20710
  source 1..80: mol_type = other DNA

SEQ ID NO: 106811 - DNA, 80 bp, synthetic construct
  source 1..80: mol_type = other DNA
tctttctctttttccagcgttacagtgtttctgccacctctgtacaaaagacaattttacttgtgtgacagatgggctct

SEQ ID NO: 106812 - DNA, 80 bp, synthetic construct
  source 1..80: mol_type = other DNA
ctgtgactacaacatattgctgcaatcaggaccattgcaataaaatagaacttccaactactggtaagttgtataaaatt

SEQ ID NO: 106813 - DNA, 80 bp, synthetic construct; identical to SEQ ID NO: 20711
  source 1..80: mol_type = other DNA

SEQ ID NO: 106814 - DNA, 80 bp, synthetic construct
  source 1..80: mol_type = other DNA
taatttcagcttgttttatgatctttttgcgtaaattaattatacatgatttctagatttttggtccttcacctgtagtt

SEQ ID NO: 106815 - DNA, 80 bp, synthetic construct
  source 1..80: mol_type = other DNA
ggcatggtggcacatgcttgtaatcccacctacttgggtggctgaggcacaacaatctttgaacctgggaggcagaggtt

SEQ ID NO: 106816 - DNA, 80 bp, synthetic construct
  source 1..80: mol_type = other DNA
gaagtctgagcacatgtatttaactcttacctctttccccagatcccaaaggaatataaaaatgagggcaacctgtatta

SEQ ID NO: 106817 - DNA, 80 bp, synthetic construct
  source 1..80: mol_type = other DNA
tagtcatcgaaaagtccagccaataacttagacaaaggatttggggggtgaggttagggtatgggggcaaactctcagtt

SEQ ID NO: 106818 - DNA, 80 bp, synthetic construct; identical to SEQ ID NO: 20712
  source 1..80: mol_type = other DNA

SEQ ID NO: 106819 - DNA, 80 bp, synthetic construct
  source 1..80: mol_type = other DNA
gaactagatagattagatgtcatcctgtgaaataggtttaccacatgatagggaagaactttcaaacagtacagggtcta

SEQ ID NO: 106820 - DNA, 80 bp, synthetic construct
  source 1..80: mol_type = other DNA
aaactgtgttacaattcagagaaaagacagttggtgagcatattaagagatatagggaacagatttagatgatccaatat

SEQ ID NO: 106821 - DNA, 80 bp, synthetic construct; identical to SEQ ID NO: 20713
  source 1..80: mol_type = other DNA

SEQ ID NO: 106822 - DNA, 80 bp, synthetic construct
  source 1..80: mol_type = other DNA
agaatgggaaagatgtgatatgaaagaaatggtggtaagcagtaaaccagtaagactcaggatgaatgtcaaaataattg

SEQ ID NO: 106823 - DNA, 80 bp, synthetic construct
  source 1..80: mol_type = other DNA
aaaaaaaaaagtaaaagatatgttctgcctttaaaaaattggtggacctattggccgggcatggctcatgcctgtaatcc

SEQ ID NO: 106824 - DNA, 80 bp, synthetic construct
  source 1..80: mol_type = other DNA
aaatccatctcaaaaaaaaaaaaaattggtggagagatatatactgaaatgtgagttgtttagaagtgatgaagatgtat

SEQ ID NO: 106825 - DNA, 80 bp, synthetic construct; identical to SEQ ID NO: 20714
  source 1..80: mol_type = other DNA

SEQ ID NO: 106826 - DNA, 80 bp, synthetic construct
  source 1..80: mol_type = other DNA
gaaaatgggggttgccacctacagtgtttttgtcgttgttgatgtttatttcactcgaggccctttttcagtaaagtcat

SEQ ID NO: 106827 - DNA, 80 bp, synthetic construct
  source 1..80: mol_type = other DNA
ttcagagggtactacgttgaaagacttaatttatgatatgacaacgtcaggttctggctcaggtaacataattgtttctc

SEQ ID NO: 106828 - DNA, 80 bp, synthetic construct
  source 1..80: mol_type = other DNA
atagattggaacttaactttaactgttaaagcgaatcaataagtcagctccatggtggtataaatttcaaagcgttctca

SEQ ID NO: 106829 - DNA, 80 bp, synthetic construct
  source 1..80: mol_type = other DNA
tcaggattgtttagcagcttgatgtttacatttgaaaacaggcatgacagaaatgtattcagaattgtgaaggttattta

SEQ ID NO: 106830 - DNA, 80 bp, synthetic construct; identical to SEQ ID NO: 20715
  source 1..80: mol_type = other DNA

SEQ ID NO: 106831 - DNA, 80 bp, synthetic construct
  source 1..80: mol_type = other DNA
aatagatctaggtttcaaggcaagctttgtcattgattggctgtataaccttggttagaacatgtttcctctttgggctt

SEQ ID NO: 106832 - DNA, 80 bp, synthetic construct
  source 1..80: mol_type = other DNA
taatgaaaatttcactaattttggtgaaagcccatctctattaaaaatgcaaaaaaattagccgggcgtagtggcatgcg

SEQ ID NO: 106833 - DNA, 80 bp, synthetic construct
  source 1..80: mol_type = other DNA
gagtgatattaaaggaatgttaaagcagaagttgtgactgggtaagaatataattctgaagcataaaatcacatctaatg

SEQ ID NO: 106834 - DNA, 80 bp, synthetic construct; identical to SEQ ID NO: 20716
  source 1..80: mol_type = other DNA

SEQ ID NO: 106835 - DNA, 80 bp, synthetic construct
  source 1..80: mol_type = other DNA
ctggtggacagaggttattttagagctttcctgggacttcccatttattctcagttcagatcttcaaaaagattttgctc

SEQ ID NO: 106836 - DNA, 80 bp, synthetic construct
  source 1..80: mol_type = other DNA
gaataagcccacctaactgattaaaggaattggtgggtgggtggcagttgattactggataagaatatcttcattaacct

SEQ ID NO: 106837 - DNA, 80 bp, synthetic construct
  source 1..80: mol_type = other DNA
ttaccctgcaaaaacttgtctgcattgcttgctagctctgtggctttgggcagttaaccaatgtctcatgcttgagttat

SEQ ID NO: 106838 - DNA, 80 bp, synthetic construct
  source 1..80: mol_type = other DNA
aacatacagtatcagttgaccacattgtacaaaacttagtttaaggcctcctttgcctgtcatagttcattgtgtactga

SEQ ID NO: 106839 - DNA, 80 bp, synthetic construct; identical to SEQ ID NO: 20717
  source 1..80: mol_type = other DNA

SEQ ID NO: 106840 - DNA, 80 bp, synthetic construct
  source 1..80: mol_type = other DNA
taattaaggaaaggccctgtctctacctctaaagactgtgcttttaacttgggaacttcagggaatacaatgaagagctg

SEQ ID NO: 106841 - DNA, 80 bp, synthetic construct; identical to SEQ ID NO: 20718
  source 1..80: mol_type = other DNA

SEQ ID NO: 106842 - DNA, 80 bp, synthetic construct
  source 1..80: mol_type = other DNA
aattctcctgcctcagcctcctgagtagctgggattacaggtgtgcaccaccatgcccagctaatttttgtatatttatt

SEQ ID NO: 106843 - DNA, 80 bp, synthetic construct
  source 1..80: mol_type = other DNA
atccaatatagataatacagtggatcaagatttgctttttaattttaattgacatctagaatccagtgataaaggggaag

SEQ ID NO: 106844 - DNA, 80 bp, synthetic construct
  source 1..80: mol_type = other DNA
ttgcaatttccagattagtctcctgaaattaactcttaagtgtacttttaagtctgtggtgtggccctctacaaggcttt

SEQ ID NO: 106845 - DNA, 80 bp, synthetic construct; identical to SEQ ID NO: 20719
  source 1..80: mol_type = other DNA

SEQ ID NO: 106846 - DNA, 80 bp, synthetic construct
  source 1..80: mol_type = other DNA
agattataaatgacaccaatttatatgtacatagattgtataaataagatatgagtgaggaacatgatgtacactggcat

SEQ ID NO: 106847 - DNA, 80 bp, synthetic construct
  source 1..80: mol_type = other DNA
ggagaaagccaagttccattagtggaaaaacagtgctccattaccaaggtaagttacttagccttgttcttcaagatact

SEQ ID NO: 106848 - DNA, 80 bp, synthetic construct
  source 1..80: mol_type = other DNA
caaaaagccagaatttacttctgtgtttctgcgttcacatccttttttcctcccatcagtgaaactgttacgagattcat

SEQ ID NO: 106849 - DNA, 80 bp, synthetic construct; identical to SEQ ID NO: 20720
  source 1..80: mol_type = other DNA

SEQ ID NO: 106850 - DNA, 80 bp, synthetic construct
  source 1..80: mol_type = other DNA
ataatatctccccagtgagataaattcctaaagggatagcttaaagtatcagttttctgggtcactcattagtgcctatc

SEQ ID NO: 106851 - DNA, 80 bp, synthetic construct
  source 1..80: mol_type = other DNA
ggggagaagaagttgctgttaagatattctcctctagagaagaacgttcgtggttccgtgaggcagagatttatcaaact

SEQ ID NO: 106852 - DNA, 80 bp, synthetic construct
  source 1..80: mol_type = other DNA
atgtagattagacccattaagtcgaatacaatatattagtaacttttagaactaggaacttcttcaagattttcttgact

SEQ ID NO: 106853 - DNA, 80 bp, synthetic construct; identical to SEQ ID NO: 20721
  source 1..80: mol_type = other DNA

SEQ ID NO: 106854 - DNA, 80 bp, synthetic construct
  source 1..80: mol_type = other DNA
gagtggggactgcaagcagtgaccttagactgtgctgctgccactttcttagcttccgttaatacctttatgcccatgat

SEQ ID NO: 106855 - DNA, 80 bp, synthetic construct
  source 1..80: mol_type = other DNA
cagctaatgtttgtatttttagtagagatggggtttcaccatgttggccaggttggcctccatctcttgacctcgtgatc

SEQ ID NO: 106856 - DNA, 80 bp, synthetic construct
  source 1..80: mol_type = other DNA
taaaaaaaaaaaaaaatgctgtcattatctcttagcttggccagacctgtagtcatctttttccttctcccaccttccat

SEQ ID NO: 106857 - DNA, 80 bp, synthetic construct; identical to SEQ ID NO: 20722
  source 1..80: mol_type = other DNA

SEQ ID NO: 106858 - DNA, 80 bp, synthetic construct
  source 1..80: mol_type = other DNA
gttatttgaagctggtcccagacaatatgttttcatctgtaaacacttataaaatgtaatttgtatcttcaaatgatgag

SEQ ID NO: 106859 - DNA, 80 bp, synthetic construct
  source 1..80: mol_type = other DNA
tgtgtcttaaaatttaggtccccccttcatcttttttctcctctcgcagcttatttgttgaagaaattggattgtttatc

SEQ ID NO: 106860 - DNA, 80 bp, synthetic construct
  source 1..80: mol_type = other DNA
catcctattgcatcatatgtggaggtgtatagtgtttgattaagacggggcagtgaggtatatgatgaatgtaggtagcg

SEQ ID NO: 106861 - DNA, 80 bp, synthetic construct
  source 1..80: mol_type = other DNA
ccccatctctactaaaaatacaaaaaaattagccaggcatgatggcaggtgcctataatcccagctacttgggaagctaa

SEQ ID NO: 106862 - DNA, 80 bp, synthetic construct; identical to SEQ ID NO: 20723
  source 1..80: mol_type = other DNA

SEQ ID NO: 106863 - DNA, 80 bp, synthetic construct
  source 1..80: mol_type = other DNA
cttccttaagaacatagccacattcatggtttcaaactctaccatgttggcaactctcaaatctccatttgaaagcttaa

SEQ ID NO: 106864 - DNA, 80 bp, synthetic construct
  source 1..80: mol_type = other DNA
ctttcttctttgtcaggggttaatgtactttctctgagcctagcccctccacctcagttcctttatcttctcctgattta

SEQ ID NO: 106865 - DNA, 80 bp, synthetic construct; identical to SEQ ID NO: 20724
  source 1..80: mol_type = other DNA

SEQ ID NO: 106866 - DNA, 80 bp, synthetic construct
  source 1..80: mol_type = other DNA
gattttttcttttggtttacaaccagcagggaaagaaagagcacagtttatgtacttcttacctaaagaatctagcattc

SEQ ID NO: 106867 - DNA, 80 bp, synthetic construct
  source 1..80: mol_type = other DNA
aatgctttttttcttcatggcttaattaagcatgtggttttccagctacttctaggttaaattagattgtcgtggaccag

SEQ ID NO: 106868 - DNA, 80 bp, synthetic construct
  source 1..80: mol_type = other DNA
tctagcttaggagcctagctagtgtctttaccattattcctatgagaaaacatgttttaaactcgtgttttggcttacag

SEQ ID NO: 106869 - DNA, 80 bp, synthetic construct; identical to SEQ ID NO: 20725
  source 1..80: mol_type = other DNA

SEQ ID NO: 106870 - DNA, 80 bp, synthetic construct
  source 1..80: mol_type = other DNA
gccagctctgataccaattatctgtgaagactcaaaaaagtcaccatctttgtctcttaaatgggattaattatacttgc

SEQ ID NO: 106871 - DNA, 80 bp, synthetic construct
  source 1..80: mol_type = other DNA
gaacaaataaatcataaatggtctgcagcccaaccgaaatgttaattctgttttacagacaatggtacttggactcagct

SEQ ID NO: 106872 - DNA, 80 bp, synthetic construct
  source 1..80: mol_type = other DNA
agttctattatttaagctttaaattttcatgaataatgtctatgaaaatagaaggtggaggctgggcctggtggctcatg

SEQ ID NO: 106873 - DNA, 80 bp, synthetic construct; identical to SEQ ID NO: 20726
  source 1..80: mol_type = other DNA

SEQ ID NO: 106874 - DNA, 80 bp, synthetic construct
  source 1..80: mol_type = other DNA
aaagtagcattcaatcttatgatttttgaggatctcagtttcagaattcaggtccaactgaatatatttttatgtgtagt

SEQ ID NO: 106875 - DNA, 80 bp, synthetic construct
  source 1..80: mol_type = other DNA
tgtagtttttgtgcatgtgggatttcagatgccagtatatctctctgctctagcagttgtccacttgcaacccaatggct

SEQ ID NO: 106876 - DNA, 80 bp, synthetic construct
  source 1..80: mol_type = other DNA
tcagagttgtacagccagcaaacactacagtcaattttagaatatcttcactccaaagagaaaccctgtagccactagca

SEQ ID NO: 106877 - DNA, 80 bp, synthetic construct; identical to SEQ ID NO: 20727
  source 1..80: mol_type = other DNA

SEQ ID NO: 106878 - DNA, 80 bp, synthetic construct
  source 1..80: mol_type = other DNA
ggagttgaattactgtatcatatgataactctatttaatggtttgaagaactgccatactattttcttaaagtgcctgaa

SEQ ID NO: 106879 - DNA, 80 bp, synthetic construct
  source 1..80: mol_type = other DNA
attgcagttgatagggaagtgatgttctacatgcttggttcctgggctgctggaatatcagtctatggctaagtttctta

SEQ ID NO: 106880 - DNA, 80 bp, synthetic construct
  source 1..80: mol_type = other DNA
cgtaagtattgtaggtcatgtgggctgaaatgctttgataatttgggttgggagaagagacttttgaacctaaagatgtg

SEQ ID NO: 106881 - DNA, 80 bp, synthetic construct
  source 1..80: mol_type = other DNA
gctgtattgcagacttaggactggcagtaagacatgattcagccacagataccattgatattgctccaaaccacagagtg

SEQ ID NO: 106882 - DNA, 80 bp, synthetic construct; identical to SEQ ID NO: 20728
  source 1..80: mol_type = other DNA

SEQ ID NO: 106883 - DNA, 80 bp, synthetic construct
  source 1..80: mol_type = other DNA
ttgctttcttagaacttttgcacatgctgtctcctggagcatactttaccctactgtttctcagcctcatacccaccttt

SEQ ID NO: 106884 - DNA, 80 bp, synthetic construct
  source 1..80: mol_type = other DNA
ccttgtattcccagcatccatcacagtgcctaatacatggtagatcctcagtagatatttgttgagtccatgagtcttca

SEQ ID NO: 106885 - DNA, 80 bp, synthetic construct; identical to SEQ ID NO: 20729
  source 1..80: mol_type = other DNA

SEQ ID NO: 106886 - DNA, 80 bp, synthetic construct
  source 1..80: mol_type = other DNA
ttgtcagtggttgctgtaggtctctgtgggtcctgacccataattttggtaggtttttgaagcttcagtatgaggactgg

SEQ ID NO: 106887 - DNA, 80 bp, synthetic construct
  source 1..80: mol_type = other DNA
tacattaggacacctttaacagtcacaattgttatgtatgtctttcattggaaaccaagatcatgaggcagatagtgtga

SEQ ID NO: 106888 - DNA, 80 bp, synthetic construct
  source 1..80: mol_type = other DNA
gcagtaaggggatgattttcaaagttctttttgcaaattttttttaggtacatggcccctgaagttctcgatgattccat

SEQ ID NO: 106889 - DNA, 80 bp, synthetic construct
  source 1..80: mol_type = other DNA
ttaattgaatgaaattatgtacagtccattatctgaaacaggatgtcaccgagtgccagagaaaacaaaggcgatgaaac

SEQ ID NO: 106890 - DNA, 80 bp, synthetic construct; identical to SEQ ID NO: 20730
  source 1..80: mol_type = other DNA

SEQ ID NO: 106891 - DNA, 80 bp, synthetic construct
  source 1..80: mol_type = other DNA
ttagatggagtacttttaatgtttactcaggaaacagtctcttaggcttggggacctagacttggctgagacctagtgcc

SEQ ID NO: 106892 - DNA, 80 bp, synthetic construct
  source 1..80: mol_type = other DNA
aagtctcactgatagggtatatatatccctgtgcaagtgagagcctgtgcacttacagaatagaatctcatttgctgcac

SEQ ID NO: 106893 - DNA, 80 bp, synthetic construct; identical to SEQ ID NO: 20731
  source 1..80: mol_type = other DNA

SEQ ID NO: 106894 - DNA, 80 bp, synthetic construct
  source 1..80: mol_type = other DNA
aatgagaaaagttgtttgtgaacagaagttaaggccaaatatcccaaacagatggcagagctgtgaagtgagtatttctt

SEQ ID NO: 106895 - DNA, 80 bp, synthetic construct
  source 1..80: mol_type = other DNA
aaacagaataatttggttttcatattcaattgtaagcacattgaaagggccatggaacatttgcagtggcctttagtgta

SEQ ID NO: 106896 - DNA, 80 bp, synthetic construct
  source 1..80: mol_type = other DNA
tgaacaaatccctttagttctctggactttaatatccctttgcaaggtgaggaactcagataaggtgattacaaaggtgt

SEQ ID NO: 106897 - DNA, 80 bp, synthetic construct; identical to SEQ ID NO: 20732
  source 1..80: mol_type = other DNA

SEQ ID NO: 106898 - DNA, 80 bp, synthetic construct
  source 1..80: mol_type = other DNA
ttcagcatgcttaaggaatttgcatgtgacatagtttaataaatgagagtgctgctagattttgtcttttagaaatttga

SEQ ID NO: 106899 - DNA, 80 bp, synthetic construct
  source 1..80: mol_type = other DNA
acaaacttaaaatttcagtgtgaggtcagatttcttctttgctttgcccagctctggtttaggattcggccttttcaggt

SEQ ID NO: 106900 - DNA, 80 bp, synthetic construct
  source 1..80: mol_type = other DNA
tcttatccagaccaatggaaaatggtgcatgcattaatttttttttttatattttcttgtaggccttgagagtaatggct

SEQ ID NO: 106901 - DNA, 80 bp, synthetic construct; identical to SEQ ID NO: 20733
  source 1..80: mol_type = other DNA

SEQ ID NO: 106902 - DNA, 80 bp, synthetic construct
  source 1..80: mol_type = other DNA
actttaggtaactctgctgtgctggagatcatctttaagggcaaaggagttggattgctgaattacaatgaaacatgtct

SEQ ID NO: 106903 - DNA, 80 bp, synthetic construct
  source 1..80: mol_type = other DNA
tcatatagtagtgaggaacataattcatgcaattgtattttgtatactattattgttctttcacttattcagaacattac

SEQ ID NO: 106904 - DNA, 80 bp, synthetic construct
  source 1..80: mol_type = other DNA
ttggaagggtttttgtggtatgtcatttggtattctattctgaaaatgcctttctcctaccaaaatgtgcttaagccact

SEQ ID NO: 106905 - DNA, 80 bp, synthetic construct
  source 1..80: mol_type = other DNA
ctctagatgcttatagtactttaatatttgtagcatacagactaatttttctaaaagggaaagtctgtctagctgcttgt

SEQ ID NO: 106906 - DNA, 80 bp, synthetic construct; identical to SEQ ID NO: 20734
  source 1..80: mol_type = other DNA

SEQ ID NO: 106907 - DNA, 80 bp, synthetic construct
  source 1..80: mol_type = other DNA
ccttgttacttgggagaggtggtagctaaagaacattctgagtataggtttttctccatttacagatgtctttggtcaaa

SEQ ID NO: 106908 - DNA, 80 bp, synthetic construct
  source 1..80: mol_type = other DNA
tagctctgaggcaagacttcgactttatagtgctatcagttccccgatacagggtcagagtaacccatacagtattttgg

SEQ ID NO: 106909 - DNA, 80 bp, synthetic construct; identical to SEQ ID NO: 20735
  source 1..80: mol_type = other DNA

SEQ ID NO: 106910 - DNA, 80 bp, synthetic construct
  source 1..80: mol_type = other DNA
ctaccagatctgctttatgaaatccaggggaccaatgcattttatcactaaaactatttttatataattttaagaatata

SEQ ID NO: 106911 - DNA, 80 bp, synthetic construct
  source 1..80: mol_type = other DNA
ttttttaaagttggagtttagttctaaattgactttacgtattactgcagttaattccttttttggctagggatggtttg

SEQ ID NO: 106912 - DNA, 80 bp, synthetic construct
  source 1..80: mol_type = other DNA
agattcaacgtggctaaaacatcttctggtaaattgtgcgtccatattcattttgtcagtagccaggagaaatggggatg

SEQ ID NO: 106913 - DNA, 80 bp, synthetic construct
  source 1..80: mol_type = other DNA
aacggctgatggaagttgtgggacccacttccatttccttcagtcattagaggtggaagggaggggtctccaagtttgga

SEQ ID NO: 106914 - DNA, 80 bp, synthetic construct; identical to SEQ ID NO: 20736
  source 1..80: mol_type = other DNA

SEQ ID NO: 106915 - DNA, 80 bp, synthetic construct
  source 1..80: mol_type = other DNA
caaaagcttatttttattcttgcactggaagaatcgtaagtcaactgtttcttgaccatggcagtgttctggctccaaat

SEQ ID NO: 106916 - DNA, 80 bp, synthetic construct
  source 1..80: mol_type = other DNA
tactggaatacccatgggccctctcaagagtgctggacttctaggacattaagatgattgtcagtacattaaacttttca

SEQ ID NO: 106917 - DNA, 80 bp, synthetic construct; identical to SEQ ID NO: 20737
  source 1..80: mol_type = other DNA

SEQ ID NO: 106918 - DNA, 80 bp, synthetic construct
  source 1..80: mol_type = other DNA
gttgctcagttactcaaatggtactgtattgtttatatttgtaccccaaataacatcgtctgtactttctgttttctgta

SEQ ID NO: 106919 - DNA, 80 bp, synthetic construct
  source 1..80: mol_type = other DNA
tttccattgaagtcgaatgatactgagaagcctgtaaagaggagaaaaaaacataagctgtgtttccccataagtttttt

SEQ ID NO: 106920 - DNA, 80 bp, synthetic construct
  source 1..80: mol_type = other DNA
gtatacgttggaatgagtcatgccatatgtagttgctgtagatggcaactagaacctttgagttacaagagtctttagaa

SEQ ID NO: 106921 - DNA, 80 bp, synthetic construct; identical to SEQ ID NO: 20738
  source 1..80: mol_type = other DNA

SEQ ID NO: 106922 - DNA, 80 bp, synthetic construct
  source 1..80: mol_type = other DNA
tttgaaggctggatttagggatttttttttttccttataacaaagacatcaccaggatatgaagcttttgttgaaagttg

SEQ ID NO: 106923 - DNA, 80 bp, synthetic construct; identical to SEQ ID NO: 20739
  source 1..80: mol_type = other DNA

SEQ ID NO: 106924 - DNA, 80 bp, synthetic construct
  source 1..80: mol_type = other DNA
gctgcgctgggggctcggtctatgacgagcagcggggtctgccatgggtcgggggctgctcaggggcctgtggccgctgc

SEQ ID NO: 106925 - DNA, 80 bp, synthetic construct
  source 1..80: mol_type = other DNA
gcggaaacgaggaaagtttcccccgcgacactcacgcagcccgactcccgtagctgcagggattgtgagtttttcttgaa

SEQ ID NO: 106926 - DNA, 80 bp, synthetic construct
  source 1..80: mol_type = other DNA
tgagaagttggttatctgaaggcggccggggagcagcggcccggagcggcagcctgagctgccaaagcagccagcgcacc

SEQ ID NO: 106927 - DNA, 80 bp, synthetic construct; identical to SEQ ID NO: 20740
  source 1..80: mol_type = other DNA

SEQ ID NO: 106928 - DNA, 80 bp, synthetic construct
  source 1..80: mol_type = other DNA
gaagggttaaaatcctaactaggctacccacctgatcgctgtctctgaaggtttttaaggaaaaaataaaaataaaaaaa

SEQ ID NO: 106929 - DNA, 80 bp, synthetic construct
  source 1..80: mol_type = other DNA
cgcaatctcggctcactgcaactttgcctctgggttcaagcgattctcctgccttagcctcccgagtagctgggattaca

SEQ ID NO: 106930 - DNA, 80 bp, synthetic construct; identical to SEQ ID NO: 20741
  source 1..80: mol_type = other DNA

SEQ ID NO: 106931 - DNA, 80 bp, synthetic construct
  source 1..80: mol_type = other DNA
tgaaatgtagaggagttgacagtccacatcacccggaggcactcattttatttatccagggacatgggcagatttacctt

SEQ ID NO: 106932 - DNA, 80 bp, synthetic construct
  source 1..80: mol_type = other DNA
cttgacacacatttgagtcctatggttttaataaaatcttagtgtttcgttcttggcgtttttcctgcattgcagtacca

SEQ ID NO: 106933 - DNA, 80 bp, synthetic construct; identical to SEQ ID NO: 20742
  source 1..80: mol_type = other DNA

SEQ ID NO: 106934 - DNA, 80 bp, synthetic construct
  source 1..80: mol_type = other DNA
gattcaaattaaattttcaaagttggccaatggttgaagacagatatattgaagacgagaaacctaattctacttacatt

SEQ ID NO: 106935 - DNA, 80 bp, synthetic construct
  source 1..80: mol_type = other DNA
tctgtcttctgtttagtagcttctgtacttctgtttagtagtatgcaaaggatttaaataaaagaacaaatttcactaag

SEQ ID NO: 106936 - DNA, 80 bp, synthetic construct
  source 1..80: mol_type = other DNA
cttattgaggacaaagaatttgtaaaagtgtcatagtgatcaggttcttcacatcactttaataacctgcttattttgtc

SEQ ID NO: 106937 - DNA, 80 bp, synthetic construct
  source 1..80: mol_type = other DNA
ttgccttcttttcaatgtagcattccctaatgatgactgttgtctatgtagtcaacataactactacatgttttctactc

SEQ ID NO: 106938 - DNA, 80 bp, synthetic construct; identical to SEQ ID NO: 20743
  source 1..80: mol_type = other DNA

SEQ ID NO: 106939 - DNA, 80 bp, synthetic construct
  source 1..80: mol_type = other DNA
catgttgaatgtttccttctaggtcccattgaatgtatttttgaatcaatttgttgtctctttcctatccctgccttgtc

SEQ ID NO: 106940 - DNA, 80 bp, synthetic construct
  source 1..80: mol_type = other DNA
ttgccatgtactggctgtgtagcctgttgtagttgctttacctactagtcatccctggtctcatttgtaaaatgaggatt

SEQ ID NO: 106941 - DNA, 80 bp, synthetic construct; identical to SEQ ID NO: 20744
  source 1..80: mol_type = other DNA

SEQ ID NO: 106942 - DNA, 80 bp, synthetic construct
  source 1..80: mol_type = other DNA
aggtaaatgtctcctatgagatacagacctctcacttagctggtaacaataccaagccaaagtcatatctttacgtaact

SEQ ID NO: 106943 - DNA, 80 bp, synthetic construct
  source 1..80: mol_type = other DNA
tcctactgtatctaatgcaactgaggtcgagcatttaactaagcagtcactgtttgttaggtgtttggtccaaatagtaa

SEQ ID NO: 106944 - DNA, 80 bp, synthetic construct
  source 1..80: mol_type = other DNA
ttcctttagccataaattttgaatcagtgtagggccttgaaagccactgcaaaattttaaataaagtcaccagaggaatt

SEQ ID NO: 106945 - DNA, 80 bp, synthetic construct; identical to SEQ ID NO: 20745
  source 1..80: mol_type = other DNA

SEQ ID NO: 106946 - DNA, 80 bp, synthetic construct
  source 1..80: mol_type = other DNA
ttttgcactctctactttcctggtaatattttgctccacaggtacttgttgcttgtgactgaggcaagataatgactcat

SEQ ID NO: 106947 - DNA, 80 bp, synthetic construct
  source 1..80: mol_type = other DNA
ataagttttattatctttattttatggatggaaagatggatcctgctcagggtctctctggagttttgcctgggtgcatg

SEQ ID NO: 106948 - DNA, 80 bp, synthetic construct
  source 1..80: mol_type = other DNA
gctcctgatttaattgatttggtttgcttgcattatctgcctccttcctgactacatttgtaccacagaaaatcaagata

SEQ ID NO: 106949 - DNA, 80 bp, synthetic construct
  source 1..80: mol_type = other DNA
tgtaggacaatcatttgtgtacaatcgtgtacaactgctgatgagggcaagaagagccgactttatccaacataacaaag

SEQ ID NO: 106950 - DNA, 80 bp, synthetic construct; identical to SEQ ID NO: 20746
  source 1..80: mol_type = other DNA

SEQ ID NO: 106951 - DNA, 80 bp, synthetic construct
  source 1..80: mol_type = other DNA
taaaatatagacctagtatatgaacacaactggcctctgtcctgggccttagatggtactctgctgtcattcttctctgg

SEQ ID NO: 106952 - DNA, 80 bp, synthetic construct
  source 1..80: mol_type = other DNA
tgaaggctgtcattgctactggttgtgcaatctctgcacgagggttgtttaagggatagctctgtgtgtgtgtgtgtctg

SEQ ID NO: 106953 - DNA, 80 bp, synthetic construct; identical to SEQ ID NO: 20747
  source 1..80: mol_type = other DNA

SEQ ID NO: 106954 - DNA, 80 bp, synthetic construct
  source 1..80: mol_type = other DNA
tcctttgcagagatgttgggtagaaataagttttggttaattgtaccattttttccctggaatagacaacattgaacatt

SEQ ID NO: 106955 - DNA, 80 bp, synthetic construct
  source 1..80: mol_type = other DNA
ttttttttttttttagatttcctagtgccctagttgcatttcttctgtgtattgagagaccaccaggcgggcaaggtgaa

SEQ ID NO: 106956 - DNA, 80 bp, synthetic construct
  source 1..80: mol_type = other DNA
tggttgaaccaacatgaatgcctttgaaagaagatatgggttgggtgcatattttcagtatatgctgcagcagctcttta

SEQ ID NO: 106957 - DNA, 80 bp, synthetic construct; identical to SEQ ID NO: 20748
  source 1..80: mol_type = other DNA

SEQ ID NO: 106958 - DNA, 80 bp, synthetic construct
  source 1..80: mol_type = other DNA
ctgtactgagactagtctgccttaattgacataaactacttgtccattatagcatgggtgttggaagactagaggttaag

SEQ ID NO: 106959 - DNA, 80 bp, synthetic construct
  source 1..80: mol_type = other DNA
caagtgatacagtcttggctgaatcatggaacaattatgccatcaggaagtttaggtattctgagtaaaacaggcacttt

SEQ ID NO: 106960 - DNA, 80 bp, synthetic construct
  source 1..80: mol_type = other DNA
gtggttaacaagtgtcatcaagtcaaatactacgaaatcttgcagtgccctgaatcttacagctcacatataaaagaaac

SEQ ID NO: 106961 - DNA, 80 bp, synthetic construct
  source 1..80: mol_type = other DNA
tctcaatagagaatattgcaaaatgttattggaagagatgatcaaagagtgtgcaaccaaaaaatataggagaattattt

SEQ ID NO: 106962 - DNA, 80 bp, synthetic construct; identical to SEQ ID NO: 20749
  source 1..80: mol_type = other DNA

SEQ ID NO: 106963 - DNA, 80 bp, synthetic construct
  source 1..80: mol_type = other DNA
cctgtatgccattttaattctaaataaatattcactttattcttaattttatattcactttattcttaattttgtattct

SEQ ID NO: 106964 - DNA, 80 bp, synthetic construct
  source 1..80: mol_type = other DNA
atttcacaaaaccaaaatatttttcctccaggtttagctaaacccttcatcattttcctactttagagccccatgccaag

SEQ ID NO: 106965 - DNA, 80 bp, synthetic construct; identical to SEQ ID NO: 20750
  source 1..80: mol_type = other DNA

SEQ ID NO: 106966 - DNA, 80 bp, synthetic construct
  source 1..80: mol_type = other DNA
caggtcagaactgagaaataccacagacttccactggtgttcattggagatgactactattaaaaaaagagaagaaaaaa

SEQ ID NO: 106967 - DNA, 80 bp, synthetic construct
  source 1..80: mol_type = other DNA
ttctccccttcctctgaattggttaaaatgtctgtgaaaatttttcctaaggtagaaagttatgaaatgctttgctatgc

SEQ ID NO: 106968 - DNA, 80 bp, synthetic construct; identical to SEQ ID NO: 20751
  source 1..80: mol_type = other DNA

SEQ ID NO: 106969 - DNA, 80 bp, synthetic construct
  source 1..80: mol_type = other DNA
acgctcatagtattggggaagaaaaaaagacaatatgatataatttgtccttcaagtatgtgaaaaggaaaaaaatctaa

SEQ ID NO: 106970 - DNA, 80 bp, synthetic construct
  source 1..80: mol_type = other DNA
tcacttctttaggagcctcattccttcctgaatattacattttatgagttattatatgcatcaaggcccaaagcttgagc

SEQ ID NO: 106971 - DNA, 80 bp, synthetic construct; identical to SEQ ID NO: 20752
  source 1..80: mol_type = other DNA

SEQ ID NO: 106972 - DNA, 80 bp, synthetic construct
  source 1..80: mol_type = other DNA
gaaggcactggtagcaagtcaactaaatgagtcagtttttaaccagtctgtttccccagtcatccttcatgagtcttttg

SEQ ID NO: 106973 - DNA, 80 bp, synthetic construct
  source 1..80: mol_type = other DNA
ctgggttcaagcgattctcctgcttcagcctcctgagtagctgggattacaggtgtgcaccaacacacttgactaatttt

SEQ ID NO: 106974 - DNA, 80 bp, synthetic construct; identical to SEQ ID NO: 20753
  source 1..80: mol_type = other DNA

SEQ ID NO: 106975 - DNA, 80 bp, synthetic construct
  source 1..80: mol_type = other DNA
ctcagtgaagacccaataaatttctcttgaattgctcaacatttgttttagacttttctgagagtgccactgtaggcttt

SEQ ID NO: 106976 - DNA, 80 bp, synthetic construct
  source 1..80: mol_type = other DNA
aataaccagtccttacaagcagtttctgatgtttccaaataattttattttctgacttttttttctttgcctttgacatc

SEQ ID NO: 106977 - DNA, 80 bp, synthetic construct
  source 1..80: mol_type = other DNA
aacacaaacctgaactcttatatttgtcatctgtaaaaatcacctaattggtctctgcttatggacaccctttgttcttt

SEQ ID NO: 106978 - DNA, 80 bp, synthetic construct
  source 1..80: mol_type = other DNA
ttggctcctaagagagtgccttgtgctgatgggacacaggaccagtttgatgactacgtgcacagatgaagccaaacctc

SEQ ID NO: 106979 - DNA, 80 bp, synthetic construct; identical to SEQ ID NO: 20754
  source 1..80: mol_type = other DNA

SEQ ID NO: 106980 - DNA, 80 bp, synthetic construct
  source 1..80: mol_type = other DNA
gcggatcacgaagtcaggagatcgagaccatcctcgctaacacgatgaaaccctgtctctactaaaagtacaaaaaatta

SEQ ID NO: 106981 - DNA, 80 bp, synthetic construct
  source 1..80: mol_type = other DNA
aaaacaaaactcttactagaatgaaaactctttgagggagaaacttctgtctgattttgccatagctcttagcacagatt

SEQ ID NO: 106982 - DNA, 80 bp, synthetic construct
  source 1..80: mol_type = other DNA
cctgtagtattgtttgacagaaccataggcttatggaaaatctcgtatgatctgctttgtgtaaattgttctttacagtg

SEQ ID NO: 106983 - DNA, 80 bp, synthetic construct; identical to SEQ ID NO: 20755
  source 1..80: mol_type = other DNA

SEQ ID NO: 106984 - DNA, 80 bp, synthetic construct
  source 1..80: mol_type = other DNA
ttaaaatgatacatgctaaggagacttaaatatgaggcctttcttacctgggtgcttaataggagtgggtttctaaggat

SEQ ID NO: 106985 - DNA, 80 bp, synthetic construct
  source 1..80: mol_type = other DNA
ctcctctatgggaattctggagctaccactgacatcacattacatagatttggactggtagtgccctacctgctctatct

SEQ ID NO: 106986 - DNA, 80 bp, synthetic construct
  source 1..80: mol_type = other DNA
acctctgcctcctgggttcaagttattctcctgcctcagcctcccgagtagctgggattgtaggtgcccactaccacacc

SEQ ID NO: 106987 - DNA, 80 bp, synthetic construct; identical to SEQ ID NO: 20756
  source 1..80: mol_type = other DNA

SEQ ID NO: 106988 - DNA, 80 bp, synthetic construct
  source 1..80: mol_type = other DNA
gtattggttgttatcagtttattactgagatgcctgtggtgtcttcaggggacaggagagaatatgttaacttcttgaat

SEQ ID NO: 106989 - DNA, 80 bp, synthetic construct
  source 1..80: mol_type = other DNA
tttcttcagaggtacatctttaataagttctgggaagggaagtgaaaaacaatgcttgacctctgatacaatgtactgtt

SEQ ID NO: 106990 - DNA, 80 bp, synthetic construct; identical to SEQ ID NO: 20757
  source 1..80: mol_type = other DNA

SEQ ID NO: 106991 - DNA, 80 bp, synthetic construct
  source 1..80: mol_type = other DNA
taaataatattaaaggcaaaaaaaaaagtcatgaaaatagtcatttgcgtacttcttcaggcagatagaaaactagtacc

SEQ ID NO: 106992 - DNA, 80 bp, synthetic construct
  source 1..80: mol_type = other DNA
aatacaaaaattagctaggagtggtgggacacgcctataatcccagctactcaggaagctgagccaggagaatcacttga

SEQ ID NO: 106993 - DNA, 80 bp, synthetic construct
  source 1..80: mol_type = other DNA
agaagtgatttgaataatttcagtatgattgagacatatgggtgaaagatcaccagagggaaaaatgtctagtctgataa

SEQ ID NO: 106994 - DNA, 80 bp, synthetic construct
  source 1..80: mol_type = other DNA
gtggaaatggaggcccagaaagatgaaatcatctgccccagctgtaataggactgcccatccactgagacatagtaaagt

SEQ ID NO: 106995 - DNA, 80 bp, synthetic construct; identical to SEQ ID NO: 20758
  source 1..80: mol_type = other DNA

SEQ ID NO: 106996 - DNA, 80 bp, synthetic construct
  source 1..80: mol_type = other DNA
cctgtagttttgcccctcactagaacttcaagttgcttaacctaatcaggaatacgggcatctttacataggaagtgcac

SEQ ID NO: 106997 - DNA, 80 bp, synthetic construct
  source 1..80: mol_type = other DNA
cacctgaggtcaagagttcaagaccagcctgaccaacatggtgaaaccctatctctactaaaaaatacaaaaattagctg

SEQ ID NO: 106998 - DNA, 80 bp, synthetic construct; identical to SEQ ID NO: 20759
  source 1..80: mol_type = other DNA

SEQ ID NO: 106999 - DNA, 80 bp, synthetic construct
  source 1..80: mol_type = other DNA
aggttaagagattgagaccatcctggccaacatggtgaaaccccgtctctactaaaaatacaaaaattaactgggcgtgg

SEQ ID NO: 107000 - DNA, 80 bp, synthetic construct
  source 1..80: mol_type = other DNA
tgattagcagaaactatttcacttgccatcatagaaagctaagctatacttctgcttttctactactagctttatataaa

SEQ ID NO: 107001 - DNA, 80 bp, synthetic construct
  source 1..80: mol_type = other DNA
ctgtgtggatcattgtgatgctttgttctcagtggggattttccagcaaagatgagcttcattaaacaatgactgggttc

SEQ ID NO: 107002 - DNA, 80 bp, synthetic construct
  source 1..80: mol_type = other DNA
taaggcagatgttattgtatcaagaaaagactcaaattttgaacatattaaaaatagtgtttcttcagatctggtggata

SEQ ID NO: 107003 - DNA, 80 bp, synthetic construct; identical to SEQ ID NO: 20760
  source 1..80: mol_type = other DNA

SEQ ID NO: 107004 - DNA, 80 bp, synthetic construct
  source 1..80: mol_type = other DNA
gaatttatacaatggcaactaaatgccctgcagccaattatgtttatgattcctgcctcatctccaaatggtactagagt

SEQ ID NO: 107005 - DNA, 80 bp, synthetic construct
  source 1..80: mol_type = other DNA
ccatgccccatctctaactactacattttttcctattgaattctccagtccatgtagcataagtcccttcctgaactcag

SEQ ID NO: 107006 - DNA, 80 bp, synthetic construct
  source 1..80: mol_type = other DNA
accatgttgagaaacactaatctagcctaacccagtgaggttacaaatgaagaatttcaccagagaggtcaaagtacttg

SEQ ID NO: 107007 - DNA, 80 bp, synthetic construct; identical to SEQ ID NO: 20761
  source 1..80: mol_type = other DNA

SEQ ID NO: 107008 - DNA, 80 bp, synthetic construct
  source 1..80: mol_type = other DNA
gcaagtggctgcctggggtgtgtgtccacacaccatatagaggcagttcttcagctctgtcagccatggccaaagcaggc

SEQ ID NO: 107009 - DNA, 80 bp, synthetic construct
  source 1..80: mol_type = other DNA
atgctcttcttgaccttaaaatccacctgatagatctggtagggaggtagaaattttggtggtaggaaagccagcaatta

SEQ ID NO: 107010 - DNA, 80 bp, synthetic construct
  source 1..80: mol_type = other DNA
gggaagataggaaatccctttctttttttcccacatgggaaataaaaatctaaagatgtgtggggaagctccttagagtg

SEQ ID NO: 107011 - DNA, 80 bp, synthetic construct; identical to SEQ ID NO: 20762
  source 1..80: mol_type = other DNA

SEQ ID NO: 107012 - DNA, 80 bp, synthetic construct
  source 1..80: mol_type = other DNA
ctgagtgtagaaggtagccagtagcctaaaaaccctgtattttggaggctgttacttcataatctctattatgaaattgg

SEQ ID NO: 107013 - DNA, 80 bp, synthetic construct
  source 1..80: mol_type = other DNA
aagatattttcacctttgcaggaagttctattgaacagtgggtctgagaccatcttagatgatacatgtggcttgaaacg

SEQ ID NO: 107014 - DNA, 80 bp, synthetic construct; identical to SEQ ID NO: 20763
  source 1..80: mol_type = other DNA

SEQ ID NO: 107015 - DNA, 80 bp, synthetic construct
  source 1..80: mol_type = other DNA
ggattataaaaatagtactgccttgtgggagaaaaatatgcttaaagtctatgagcatggagtggtagggattataaacc

SEQ ID NO: 107016 - DNA, 80 bp, synthetic construct
  source 1..80: mol_type = other DNA
ccctgtgaataaatttcacccaccttggtcacctctgtgctgtattctcctagaaactcacctttatttggcatgctgtg

SEQ ID NO: 107017 - DNA, 80 bp, synthetic construct
  source 1..80: mol_type = other DNA
agtcattgaaatggggcttaataagaattacttgataccttaggagtcagacgagccttacatttatcttgggctcaggg

SEQ ID NO: 107018 - DNA, 80 bp, synthetic construct
  source 1..80: mol_type = other DNA
tcttctctccctacctcagcagtgacactacagacagccagtcatttaatacgagactcattccttaagaagttgggata

SEQ ID NO: 107019 - DNA, 80 bp, synthetic construct; identical to SEQ ID NO: 20764
  source 1..80: mol_type = other DNA

SEQ ID NO: 107020 - DNA, 80 bp, synthetic construct
  source 1..80: mol_type = other DNA
ctcatggctactgtgtagctctatctagattatgcccttgacttttgaacaatgtgtcttgggagagttctcttggctct

SEQ ID NO: 107021 - DNA, 80 bp, synthetic construct
  source 1..80: mol_type = other DNA
ccttttttctctgtgactatatccttattctttatccagcaacagcaaatatgcattaattttctgcagataaggtttcc

SEQ ID NO: 107022 - DNA, 80 bp, synthetic construct; identical to SEQ ID NO: 20765
  source 1..80: mol_type = other DNA

SEQ ID NO: 107023 - DNA, 80 bp, synthetic construct
  source 1..80: mol_type = other DNA
cctcccccatggtttctcatttttgcttctctttctaagagttacatttataggcatacatttttacactggacatcaca

SEQ ID NO: 107024 - DNA, 80 bp, synthetic construct
  source 1..80: mol_type = other DNA
gataagattcagtgtggggcaaatctaaggtgccaaagttaggtacatactagaacttccataaagagttgtcttaagaa

SEQ ID NO: 107025 - DNA, 80 bp, synthetic construct
  source 1..80: mol_type = other DNA
atgttggaagattgcaccttgaagactgtgtgcatggttctcattttccatcttaaaatcactgctggaatctatcttga

SEQ ID NO: 107026 - DNA, 80 bp, synthetic construct
  source 1..80: mol_type = other DNA
agtggattagtcccacataaaagggctggaggtaaccagcctggatccttttgcccttccattttctgctatgtgatgac

SEQ ID NO: 107027 - DNA, 80 bp, synthetic construct; identical to SEQ ID NO: 20766
  source 1..80: mol_type = other DNA

SEQ ID NO: 107028 - DNA, 80 bp, synthetic construct
  source 1..80: mol_type = other DNA
ctagctaatttttgtatttttagtagagacggggtttcgccatattggccaggatggtcttgatttcttgacctcgtgat

SEQ ID NO: 107029 - DNA, 80 bp, synthetic construct
  source 1..80: mol_type = other DNA
agagacctttatgatgtttactgcaaattgcatcaaggtcatgacagcaatgagtaatgcccaggaaaggcgaagatcaa

SEQ ID NO: 107030 - DNA, 80 bp, synthetic construct
  source 1..80: mol_type = other DNA
tttacttcctctgcttgaaaaacatgaagggggaagtttcaaagtgtttggtgttatcttagaaaccaaagtgaatctga

SEQ ID NO: 107031 - DNA, 80 bp, synthetic construct; identical to SEQ ID NO: 20767
  source 1..80: mol_type = other DNA

SEQ ID NO: 107032 - DNA, 80 bp, synthetic construct
  source 1..80: mol_type = other DNA
ccatattcttctgtaattctttcatcagctgtgaatgaaagtacagcagttttatttccttgaaaagtaagccaaacatg

SEQ ID NO: 107033 - DNA, 80 bp, synthetic construct
  source 1..80: mol_type = other DNA
gtaagcagaggatttgaaaattgaactggattctcaagttactgcctgtttgccagacctatgctggttatgaacaatat

SEQ ID NO: 107034 - DNA, 80 bp, synthetic construct
  source 1..80: mol_type = other DNA
tttagaagtcatcaaactgctacattctattgatgagtaggaatagatttaccaaactcatacttatcttgtcatttgtt

SEQ ID NO: 107035 - DNA, 80 bp, synthetic construct; identical to SEQ ID NO: 20768
  source 1..80: mol_type = other DNA

SEQ ID NO: 107036 - DNA, 80 bp, synthetic construct
  source 1..80: mol_type = other DNA
ctttcttcaactcctagtagtcacacctgtgtctttgccttgtactggaatgtgtgtaaagttctactcttaaacttttt

SEQ ID NO: 107037 - DNA, 80 bp, synthetic construct
  source 1..80: mol_type = other DNA
attgcatggtggttgtgataagtaaatgaaataatcatcacagtacttaatactggactaagcatttggtctgcattcga

SEQ ID NO: 107038 - DNA, 80 bp, synthetic construct
  source 1..80: mol_type = other DNA
ttctagttaaaccctaatattagaagagagaattgaatgtgcaggtgaaataatcattaattgtaaacattcaggtggcc

SEQ ID NO: 107039 - DNA, 80 bp, synthetic construct; identical to SEQ ID NO: 20769
  source 1..80: mol_type = other DNA

SEQ ID NO: 107040 - DNA, 80 bp, synthetic construct
  source 1..80: mol_type = other DNA
tggacctcgttatattactttttaaagggatgcctttcccaaatatggtagtactctggcccttttccagagaaaatatg

SEQ ID NO: 107041 - DNA, 80 bp, synthetic construct
  source 1..80: mol_type = other DNA
gaacattgatattcggaccaaatcccatgcttagttgaggcaaatggttcatttcaggggctgatttttcagattctcta

SEQ ID NO: 107042 - DNA, 80 bp, synthetic construct
  source 1..80: mol_type = other DNA
aagctcttttgatgaaaatcatttcgtgcatttttaaaaattccctagaagaacttaaagatcttgaggaaaggaccatg

SEQ ID NO: 107043 - DNA, 80 bp, synthetic construct; identical to SEQ ID NO: 20770
  source 1..80: mol_type = other DNA

SEQ ID NO: 107044 - DNA, 80 bp, synthetic construct
  source 1..80: mol_type = other DNA
agggagaattgttttctcagttgctgtcactttaggtaaagtaccaactttaaagcacttctcagcagaggcataaagtt

SEQ ID NO: 107045 - DNA, 80 bp, synthetic construct
  source 1..80: mol_type = other DNA
cctacattctggtttttgactcatctcatagtccctgcagtcagtctttgccagataaaggcactgttaaagtgagcttt

SEQ ID NO: 107046 - DNA, 80 bp, synthetic construct; identical to SEQ ID NO: 20771
  source 1..80: mol_type = other DNA

SEQ ID NO: 107047 - DNA, 80 bp, synthetic construct
  source 1..80: mol_type = other DNA
caagtatgcatttttaggatttatttggggtcattggggctggtaagtgttaaataggaaaggatgcaattgaaattcca

SEQ ID NO: 107048 - DNA, 80 bp, synthetic construct
  source 1..80: mol_type = other DNA
attggatgaattcatttgagacacaagtaatcattccttaatcccttaatttgtttggtaaatacaaatttatgtttatg

SEQ ID NO: 107049 - DNA, 80 bp, synthetic construct
  source 1..80: mol_type = other DNA
tatcagctctgtctccatttctgacctcatgtttgcatttaaaggcaagtaactgattcacatgaggttgccgttgttaa

SEQ ID NO: 107050 - DNA, 80 bp, synthetic construct
  source 1..80: mol_type = other DNA
agagtatcccagacatttgatatccttaattgttggccagatggtaggtagtttcagtgtgaaaatatatatgtatgtgt

SEQ ID NO: 107051 - DNA, 80 bp, synthetic construct; identical to SEQ ID NO: 20772
  source 1..80: mol_type = other DNA

SEQ ID NO: 107052 - DNA, 80 bp, synthetic construct
  source 1..80: mol_type = other DNA
aaaaagttgcttctcaacctcagttttctacctatttattttccttttacagggccaaataatgtttgattctcatgtcc

SEQ ID NO: 107053 - DNA, 80 bp, synthetic construct
  source 1..80: mol_type = other DNA
gatcacgaggtcaggagatcgagaccatcctggctaacacggtgaaaccccgtctctactaaaaatacaaaaaattagcc

SEQ ID NO: 107054 - DNA, 80 bp, synthetic construct; identical to SEQ ID NO: 20773
  source 1..80: mol_type = other DNA

SEQ ID NO: 107055 - DNA, 80 bp, synthetic construct
  source 1..80: mol_type = other DNA
agtaaatcttggaaatgacctcctgaagagaacctgtgacctccaagtgagggacttggccagctggaaaagattccaca

SEQ ID NO: 107056 - DNA, 80 bp, synthetic construct
  source 1..80: mol_type = other DNA
caagggtggagaactgatctctaagggcaatagaagacacccagcccaagtaactctatacattggtctctaccttgctt

SEQ ID NO: 107057 - DNA, 80 bp, synthetic construct
  source 1..80: mol_type = other DNA
tccttacaaacaacactgcagcgaatttatcaatgaatatcataaatttttagaagcgaaagtgcgaggcaaaaggctat

SEQ ID NO: 107058 - DNA, 80 bp, synthetic construct; identical to SEQ ID NO: 20774
  source 1..80: mol_type = other DNA

SEQ ID NO: 107059 - DNA, 80 bp, synthetic construct
  source 1..80: mol_type = other DNA
cacttgtagaatacttactatttaaaagcaagaattataaggcattgtcatttcacagagattttagagtattcactttg

SEQ ID NO: 107060 - DNA, 80 bp, synthetic construct
  source 1..80: mol_type = other DNA
gagaccatgtggactgtcagttgaaggaaagcccgatacctctcttctctcaaggtataattagataaagcattagggtt

SEQ ID NO: 107061 - DNA, 80 bp, synthetic construct
  source 1..80: mol_type = other DNA
caaggtatctgattggcttggggatgtctttcctgaagaattatacagggaatcctctcagattgcttgactttcttctt

SEQ ID NO: 107062 - DNA, 80 bp, synthetic construct; identical to SEQ ID NO: 20775
  source 1..80: mol_type = other DNA

SEQ ID NO: 107063 - DNA, 80 bp, synthetic construct
  source 1..80: mol_type = other DNA
aactccaaaatgactggagaaagggaaacaattattaaaaactgggttctccacagccttcccactcaacatatagtggg

SEQ ID NO: 107064 - DNA, 80 bp, synthetic construct
  source 1..80: mol_type = other DNA
gccttaagagcaaaagctgaggtttctgagagaaaaaatactgcctcaaaactgcagcattgatttctgcctgagttccc

SEQ ID NO: 107065 - DNA, 80 bp, synthetic construct
  source 1..80: mol_type = other DNA
ctaaaacagtaaattctatccaccagtttccatggattattctttgagatgttatttaattgtgtcaatttcagtggtct

SEQ ID NO: 107066 - DNA, 80 bp, synthetic construct
  source 1..80: mol_type = other DNA
tttctgacaagtgtttatggttattgttaaaccttgagattttacctaatggttcagctaataatagacactatttcaaa

SEQ ID NO: 107067 - DNA, 80 bp, synthetic construct; identical to SEQ ID NO: 20776
  source 1..80: mol_type = other DNA

SEQ ID NO: 107068 - DNA, 80 bp, synthetic construct
  source 1..80: mol_type = other DNA
ctattaggggtagaaaattctctaaagatggttagctgctcacagagagtctataggaatcgaagtacagtcatctcttg

SEQ ID NO: 107069 - DNA, 80 bp, synthetic construct
  source 1..80: mol_type = other DNA
attctatgtaaatagttgttatactgtgttgcttagggaataatgacaagaaaaaagtctgtacataattcagtacagcc

SEQ ID NO: 107070 - DNA, 80 bp, synthetic construct; identical to SEQ ID NO: 20777
  source 1..80: mol_type = other DNA

SEQ ID NO: 107071 - DNA, 80 bp, synthetic construct
  source 1..80: mol_type = other DNA
atgactgttacccttccctcccactggccctcatcccactctgaccagcagtataccacttagcatgttattagtgactc

SEQ ID NO: 107072 - DNA, 80 bp, synthetic construct
  source 1..80: mol_type = other DNA
aaaggtttagagtagctttgccctctgaacttaactacctattccaccagtacatatggtatgcataaaaggacctgagg

SEQ ID NO: 107073 - DNA, 80 bp, synthetic construct
  source 1..80: mol_type = other DNA
aaaaaaaattctggttaagctcttgcagtggtagcttctgctgtaacaaggagaaaaatgtggcatccctggctgggttc

SEQ ID NO: 107074 - DNA, 80 bp, synthetic construct
  source 1..80: mol_type = other DNA
gttgcttgtttggcttttcttcaacattcaatggaaaggctttctcttgttgggtctacccatcaagtaacatgtattat

SEQ ID NO: 107075 - DNA, 80 bp, synthetic construct; identical to SEQ ID NO: 20778
  source 1..80: mol_type = other DNA

SEQ ID NO: 107076 - DNA, 80 bp, synthetic construct
  source 1..80: mol_type = other DNA
agcacggagaagaatttctatctgaggtgtgaaagagctaatcacctctccttaggtgcatgtttttcacaagggaacta

SEQ ID NO: 107077 - DNA, 80 bp, synthetic construct
  source 1..80: mol_type = other DNA
atcatctgggcagcttctaaaaatcctgatgcctcagttaccttccagaaaaattaaatcagactatctgggagtgggac

SEQ ID NO: 107078 - DNA, 80 bp, synthetic construct
  source 1..80: mol_type = other DNA
caaatagatgcttgtccaaaacatactctatacaaaaaatacgtatgtatgaaataaacaaaacgtggtttcactttttt

SEQ ID NO: 107079 - DNA, 80 bp, synthetic construct; identical to SEQ ID NO: 20779
  source 1..80: mol_type = other DNA

SEQ ID NO: 107080 - DNA, 80 bp, synthetic construct
  source 1..80: mol_type = other DNA
aatcctaaaattcacaggacagagagtgactgtggaaaggcattgaaagtgttcctctctaggcaagagcggagggaaca

SEQ ID NO: 107081 - DNA, 80 bp, synthetic construct
  source 1..80: mol_type = other DNA
gtagccttgtcatacttcactgactgtccaaactcatgtcttaaacatcatcaccatctcattgaggaagaaaatgggga

SEQ ID NO: 107082 - DNA, 80 bp, synthetic construct
  source 1..80: mol_type = other DNA
acatggcatcaagggccaaacatggactccttgtattcatcctgtgttcactcatttatccaataaacatttttgtatgc

SEQ ID NO: 107083 - DNA, 80 bp, synthetic construct; identical to SEQ ID NO: 20780
  source 1..80: mol_type = other DNA

SEQ ID NO: 107084 - DNA, 80 bp, synthetic construct
  source 1..80: mol_type = other DNA
cagtaagtgttagttaatcaattgatttgcctcaaacacagagagagatcagtagaactagtcccttgaaaagaagaccc

SEQ ID NO: 107085 - DNA, 80 bp, synthetic construct
  source 1..80: mol_type = other DNA
ccctctattttgggtcaccctgacttggtctgtttcctgtcttattcaccagctaaactataatttccttaagggtactt

SEQ ID NO: 107086 - DNA, 80 bp, synthetic construct; identical to SEQ ID NO: 20781
  source 1..80: mol_type = other DNA

SEQ ID NO: 107087 - DNA, 80 bp, synthetic construct
  source 1..80: mol_type = other DNA
atagtcactgacaacaacggtgcagtcaagtttccacaactgtgtaaattttgtgatgtgagattttccacctgtgacaa

SEQ ID NO: 107088 - DNA, 80 bp, synthetic construct
  source 1..80: mol_type = other DNA
cataatgtattctcatagtacacacagtcagtgtatctctgtctcctaaatgtaaacacctgttccatttccctttcctt

SEQ ID NO: 107089 - DNA, 80 bp, synthetic construct
  source 1..80: mol_type = other DNA
tttcttgtatcaagaagagggatttgccgcttagtagtcatttaaccgacacctcctcagcaccccatagtgagaccagg

SEQ ID NO: 107090 - DNA, 80 bp, synthetic construct; identical to SEQ ID NO: 20782
  source 1..80: mol_type = other DNA

SEQ ID NO: 107091 - DNA, 80 bp, synthetic construct
  source 1..80: mol_type = other DNA
acacctggctaagttttgtatttttagtagagacggggtttcaccatgttggccaggctggtctcgaactcccgacctca

SEQ ID NO: 107092 - DNA, 80 bp, synthetic construct
  source 1..80: mol_type = other DNA
atacatacacagtggatactcatgaatcatttgattaattcatggttatagattgtgagcatgaacaagaaataaccttg

SEQ ID NO: 107093 - DNA, 80 bp, synthetic construct
  source 1..80: mol_type = other DNA
tctcctggctagttgacaaacaagaatataaacccaaatatctctcccccttttttgggaatgagtcatttgagacccct

SEQ ID NO: 107094 - DNA, 80 bp, synthetic construct
  source 1..80: mol_type = other DNA
catacttgccaatatgatatgatacctgtccatgtccacttctaggtaacgctttcaaagaaaggatttggacaaagaat

SEQ ID NO: 107095 - DNA, 80 bp, synthetic construct; identical to SEQ ID NO: 20783
  source 1..80: mol_type = other DNA

SEQ ID NO: 107096 - DNA, 80 bp, synthetic construct
  source 1..80: mol_type = other DNA
tatctacggtggtgtgagcacttgcttttgcaacccaaaaaggctcttttaattaagatttttgttttcctgaccagtaa

SEQ ID NO: 107097 - DNA, 80 bp, synthetic construct
  source 1..80: mol_type = other DNA
taaagggtaaatacaatgaacattattttgacctgtgctggccaaagaaaattctcccgtgaagccaggggtgttgataa

SEQ ID NO: 107098 - DNA, 80 bp, synthetic construct; identical to SEQ ID NO: 20784
  source 1..80: mol_type = other DNA

SEQ ID NO: 107099 - DNA, 80 bp, synthetic construct
  source 1..80: mol_type = other DNA
tccaggaaacctaaactaagacaggaggctattgtaaaaatagccagtgtggaaactgaaaggctctactatgattgtag

SEQ ID NO: 107100 - DNA, 80 bp, synthetic construct
  source 1..80: mol_type = other DNA
cagttgtgtgcccattccatataaaatgcttaagctgcctccaaggatagaaatattttataaccaaaattattattatt

SEQ ID NO: 107101 - DNA, 80 bp, synthetic construct
  source 1..80: mol_type = other DNA
ctaattttttgtatttttagtagagatggggtttcactgtgttggccaggctggtctcgaactcctgaccttgtgatccg

SEQ ID NO: 107102 - DNA, 80 bp, synthetic construct
  source 1..80: mol_type = other DNA
acttctttgtatttacctttcctatgctcagctatatccaaaaagagtttgaaaagttagctgtgcctggctgttacagg

SEQ ID NO: 107103 - DNA, 80 bp, synthetic construct; identical to SEQ ID NO: 20785
  source 1..80: mol_type = other DNA

SEQ ID NO: 107104 - DNA, 80 bp, synthetic construct
  source 1..80: mol_type = other DNA
aattatacatcatttgttgtatgatcatgccaactttcatttagtttcatttggtgtcctgatagccaccctcaaccaat

SEQ ID NO: 107105 - DNA, 80 bp, synthetic construct
  source 1..80: mol_type = other DNA
actggcaccattcctgcctggattgtcctaacccatacccttgcccttatccctttgtcaacatattgtcctttaatgtc

SEQ ID NO: 107106 - DNA, 80 bp, synthetic construct
  source 1..80: mol_type = other DNA
ggcagggaggattaggggaaaattggtgagtgagtacatgcatgcattggctcatgtgtgcactcagaatcttcatagaa

SEQ ID NO: 107107 - DNA, 80 bp, synthetic construct; identical to SEQ ID NO: 20786
  source 1..80: mol_type = other DNA

SEQ ID NO: 107108 - DNA, 80 bp, synthetic construct
  source 1..80: mol_type = other DNA
agtagttagtttatgacagcataaaatatttcattgaactgtaaatgaagaacaccctgacatccctttccatttctttt

SEQ ID NO: 107109 - DNA, 80 bp, synthetic construct
  source 1..80: mol_type = other DNA
agcaaacaaaaaaaagaggaactgtgactatttccccaggcatgctctttgaaaacagtatagctagacaggacagattt

SEQ ID NO: 107110 - DNA, 80 bp, synthetic construct
  source 1..80: mol_type = other DNA
cgtggaacgctgtctgctccaggtgatgtttataatcacaaatgggttccaagaataaacaaaggaaaaacagaaaagag

SEQ ID NO: 107111 - DNA, 80 bp, synthetic construct; identical to SEQ ID NO: 20787
  source 1..80: mol_type = other DNA

SEQ ID NO: 107112 - DNA, 80 bp, synthetic construct
  source 1..80: mol_type = other DNA
ctttcttcatgtgttcctgtagctctgatgagtgcaatgacaacatcatcttctcagaaggtgagttttcttctcttaag

SEQ ID NO: 107113 - DNA, 80 bp, synthetic construct
  source 1..80: mol_type = other DNA
aggggcttggggagtagcagggtttgttctggttctcatcaaatatggttgactggggcaaacattattatttgtctttg

SEQ ID NO: 107114 - DNA, 80 bp, synthetic construct
  source 1..80: mol_type = other DNA
cctcccagtaattctgtgcagctaaaatttggtaactattgttctaaagatttggatggggttgtttaatcttggaggag

SEQ ID NO: 107115 - DNA, 80 bp, synthetic construct; identical to SEQ ID NO: 20788
  source 1..80: mol_type = other DNA

SEQ ID NO: 107116 - DNA, 80 bp, synthetic construct
  source 1..80: mol_type = other DNA
gtctctatcattcattcatattatctcccactccatcctctctcccaatctctccctgtcttcctttctctttccctcct

SEQ ID NO: 107117 - DNA, 80 bp, synthetic construct
  source 1..80: mol_type = other DNA
ttagtctcgaatttcatattatctcccacgatggatcttatcatgtccctgttgatggattgtcttcagtttttccactt

SEQ ID NO: 107118 - DNA, 80 bp, synthetic construct; identical to SEQ ID NO: 20789
  source 1..80: mol_type = other DNA

SEQ ID NO: 107119 - DNA, 80 bp, synthetic construct
  source 1..80: mol_type = other DNA
atgtgcattccacctgcgagaagctatgtgtcctcgtgtttcgtgtttggtgctcagtagcactgcagatccagcttgtt

SEQ ID NO: 107120 - DNA, 80 bp, synthetic construct
  source 1..80: mol_type = other DNA
attactcttccttcctatgttctcatcctcatcctgtaaatggtccatttctctcgttttcttttctggttgtttttttt

SEQ ID NO: 107121 - DNA, 80 bp, synthetic construct
  source 1..80: mol_type = other DNA
atctttgtatttttagtagagacgagtttcaccatgttcgtcagtctggtctcgaactcctgacctcaggtgaataacct

SEQ ID NO: 107122 - DNA, 80 bp, synthetic construct; identical to SEQ ID NO: 20790
  source 1..80: mol_type = other DNA

SEQ ID NO: 107123 - DNA, 80 bp, synthetic construct
  source 1..80: mol_type = other DNA
tatgagcctttcagatactaatgacttccattttcagagtctttcaactcaagtgatcatcatgggcatccctcatattt

SEQ ID NO: 107124 - DNA, 80 bp, synthetic construct
  source 1..80: mol_type = other DNA
gagtcttctaaaatgctccagaaggtagggggtgtttgctttttaagcatctcttttctgtgtggtgggatatttcttcc

SEQ ID NO: 107125 - DNA, 80 bp, synthetic construct
  source 1..80: mol_type = other DNA
ggctcactgcaacctctgcctcctggattcaagcaattctcctgcctcagcctctcaagtagctgggattacaggcatct

SEQ ID NO: 107126 - DNA, 80 bp, synthetic construct
  source 1..80: mol_type = other DNA
actcttaatgttgatttgtctactccaagtccaacaaggtggtgaacacaaaagctatgaagtgcattgtggctgtatta

SEQ ID NO: 107127 - DNA, 80 bp, synthetic construct; identical to SEQ ID NO: 20791
  source 1..80: mol_type = other DNA

SEQ ID NO: 107128 - DNA, 80 bp, synthetic construct
  source 1..80: mol_type = other DNA
tccttttttaattctttccttttttcctctttttatttccttctttctctttatatctctgtatgtttccaaagagataa

SEQ ID NO: 107129 - DNA, 80 bp, synthetic construct
  source 1..80: mol_type = other DNA
tgtcatagatgccctttcctcagaggactgagatcatggtttttagaatgaaagagttaaagaaaccttgctgttttttt

SEQ ID NO: 107130 - DNA, 80 bp, synthetic construct; identical to SEQ ID NO: 20792
  source 1..80: mol_type = other DNA

SEQ ID NO: 107131 - DNA, 80 bp, synthetic construct
  source 1..80: mol_type = other DNA
ctgtttacttgccaatgacatccccactttgcaaagacatgatatggttattgatctctcactgaacctgtaagaatcaa

SEQ ID NO: 107132 - DNA, 80 bp, synthetic construct
  source 1..80: mol_type = other DNA
gaggtgatttctgctggtttaggtaagagagaaacggtctagtgtaatactcaagaatgagctagatctcctggatttaa

SEQ ID NO: 107133 - DNA, 80 bp, synthetic construct
  source 1..80: mol_type = other DNA
agtagattaatgcatgtaaagtgcttgcaacgttgcctgacatgtcactgtctgttagctgttagcagtagttgggcttt

SEQ ID NO: 107134 - DNA, 80 bp, synthetic construct
  source 1..80: mol_type = other DNA
atttggatacctacatatcacaccacaaggttttggaggggctcactttgctttaatccctgtttcatccagtttctctt

SEQ ID NO: 107135 - DNA, 80 bp, synthetic construct; identical to SEQ ID NO: 20793
  source 1..80: mol_type = other DNA

SEQ ID NO: 107136 - DNA, 80 bp, synthetic construct
  source 1..80: mol_type = other DNA
aggtgcatcctttcttacttcttcttcccctgattaacgagaacactctacaccaagacacatacctcttctgaacggta

SEQ ID NO: 107137 - DNA, 80 bp, synthetic construct
  source 1..80: mol_type = other DNA
tggtgtgaactcaccaggtagggatggaaccagagatggaggtcttattaacttcatgctggtaactccctgagctaatg

SEQ ID NO: 107138 - DNA, 80 bp, synthetic construct
  source 1..80: mol_type = other DNA
ctggtgtggatcttaatgtggagaaaatcagacaccttttcagtaagcatttcttttgtttctgtgatcatgttcatgtt

SEQ ID NO: 107139 - DNA, 80 bp, synthetic construct; identical to SEQ ID NO: 20794
  source 1..80: mol_type = other DNA

SEQ ID NO: 107140 - DNA, 80 bp, synthetic construct
  source 1..80: mol_type = other DNA
ctgcttattctagaaaatgagaggcactggggccatataggaaagggatagcattggacccaagtcctagactttcagta

SEQ ID NO: 107141 - DNA, 80 bp, synthetic construct
  source 1..80: mol_type = other DNA
actttcaggtgtgttgtcttgtttcatagactcattacatttttatgatgaagtgaaacccgtgaattggctcctccaga

SEQ ID NO: 107142 - DNA, 80 bp, synthetic construct; identical to SEQ ID NO: 20795
  source 1..80: mol_type = other DNA

SEQ ID NO: 107143 - DNA, 80 bp, synthetic construct
  source 1..80: mol_type = other DNA
agccgtgtgtaagctcttggttcttggggtaactacttgtttacctctctgaaaaatgggagtagaaataatgaatactt

SEQ ID NO: 107144 - DNA, 80 bp, synthetic construct
  source 1..80: mol_type = other DNA
agatttgtaccaacgtcatgtattctcctcttccctgcaaattcctccacctgagtcctattgaggtgctccccattata

SEQ ID NO: 107145 - DNA, 80 bp, synthetic construct
  source 1..80: mol_type = other DNA
cttaaggacactttgaagcataccgagcaggggtctgcaaacttctttgataacaggcaagatagtaaatattttcagct

SEQ ID NO: 107146 - DNA, 80 bp, synthetic construct; identical to SEQ ID NO: 20796
  source 1..80: mol_type = other DNA

SEQ ID NO: 107147 - DNA, 80 bp, synthetic construct
  source 1..80: mol_type = other DNA
gtcgttgttgttgtttttgggaatgggataggactgtaagtaaataaatcaattatatcttgctagcttagaaaccagga

SEQ ID NO: 107148 - DNA, 80 bp, synthetic construct
  source 1..80: mol_type = other DNA
agaggggcagagaagaagacttcttgtagccacaaagtttcattccttcctctctcattgttgtagcatttcttttaagt

SEQ ID NO: 107149 - DNA, 80 bp, synthetic construct
  source 1..80: mol_type = other DNA
ttacaccatccagcaaacccactctgtgtactgatcgcatgcattgagcattttgttgacttccgttgttttccgagtaa

SEQ ID NO: 107150 - DNA, 80 bp, synthetic construct
  source 1..80: mol_type = other DNA
tgctgccttggaactgtgcactcacgcctcaaaatagctggctttccagctgtgcatttttgtttcaaaagaaacaaacc

SEQ ID NO: 107151 - DNA, 80 bp, synthetic construct; identical to SEQ ID NO: 20797
  source 1..80: mol_type = other DNA

SEQ ID NO: 107152 - DNA, 80 bp, synthetic construct
  source 1..80: mol_type = other DNA
gtgaatatttgtactctagaacctcattctggtatgaatcagcagagtggaatctagtatggacacaggctgtctcaaat

SEQ ID NO: 107153 - DNA, 80 bp, synthetic construct
  source 1..80: mol_type = other DNA
cataaactccacacccatgagtaatggcaagaagggtccactgagaccttttgctgctttgcgagtgtctcagtgtccca

SEQ ID NO: 107154 - DNA, 80 bp, synthetic construct
  source 1..80: mol_type = other DNA
tggaaagtccttttgtattctaaatcgctcctgcatgttacctgttgtggaaaatatcaattttgccattacaaattatg

SEQ ID NO: 107155 - DNA, 80 bp, synthetic construct; identical to SEQ ID NO: 20798
  source 1..80: mol_type = other DNA

SEQ ID NO: 107156 - DNA, 80 bp, synthetic construct
  source 1..80: mol_type = other DNA
actcaagacagtttgttctgccaaatctttttatatttttcgtcacgttccccctgtagcctggaaagggacggtaacaa

SEQ ID NO: 107157 - DNA, 80 bp, synthetic construct
  source 1..80: mol_type = other DNA
ctttggaacaaggtcaacggcctcattgggaataggcatcttagcttttaaaactgattaaattatacgttaaaggaaag

SEQ ID NO: 107158 - DNA, 80 bp, synthetic construct; identical to SEQ ID NO: 20799
  source 1..80: mol_type = other DNA

SEQ ID NO: 107159 - DNA, 80 bp, synthetic construct
  source 1..80: mol_type = other DNA
aaagaattaaagaatcagggcaggtgtggggatcctaacaaaacctaagcttttagtagtcagaaaactgcaataacaca

SEQ ID NO: 107160 - DNA, 80 bp, synthetic construct
  source 1..80: mol_type = other DNA
aagtagcaggaatctatatcctaaggaggaacataaagggtgaaaagcacagtggaagggatgcctaaaagagcaaaggc

SEQ ID NO: 107161 - DNA, 80 bp, synthetic construct
  source 1..80: mol_type = other DNA
tgagttaaggtcattttgaaatcaggatgatctggctgaaagaatcaaaacaaaacagaaagaacaaaccatcaggagcc

SEQ ID NO: 107162 - DNA, 80 bp, synthetic construct; identical to SEQ ID NO: 20800
  source 1..80: mol_type = other DNA

SEQ ID NO: 107163 - DNA, 80 bp, synthetic construct
  source 1..80: mol_type = other DNA
aaacggattcattttgttactttttgctttagagaacagcagaaggaccaataatagaagcacacagaggctacatttga

SEQ ID NO: 107164 - DNA, 80 bp, synthetic construct
  source 1..80: mol_type = other DNA
gggtattctagaaagagattatcatactggattagaatacatgcaaggcttttccatctgggagagagataagaaggaaa

SEQ ID NO: 107165 - DNA, 80 bp, synthetic construct
  source 1..80: mol_type = other DNA
tgctatcaatagctagaagttaaattaaatccttcattgctagtgagcttactgtccttttgttgtttaattgaaatgac

SEQ ID NO: 107166 - DNA, 80 bp, synthetic construct
  source 1..80: mol_type = other DNA
caattccactaagaaattttttgtaggaggaaagcatctctatggcagagtaccaaagaacttaactttatttttgctaa

SEQ ID NO: 107167 - DNA, 80 bp, synthetic construct; identical to SEQ ID NO: 20801
  source 1..80: mol_type = other DNA

SEQ ID NO: 107168 - DNA, 80 bp, synthetic construct
  source 1..80: mol_type = other DNA
caaggttaatgggtctattgtttaaattcggaatccagtcaaggacaacacattaaaattgattgttttgcctctacagt

SEQ ID NO: 107169 - DNA, 80 bp, synthetic construct
  source 1..80: mol_type = other DNA
aacagtaattctgcaaaaaagcaaggtttgccatttgtattcagtcatattagtagcaagacgactacagatgcatactt

SEQ ID NO: 107170 - DNA, 80 bp, synthetic construct; identical to SEQ ID NO: 20802
  source 1..80: mol_type = other DNA

SEQ ID NO: 107171 - DNA, 80 bp, synthetic construct
  source 1..80: mol_type = other DNA
tatattattttaaatacccttaggagaaaggaaagaggaagagagggctaacttttttgggggggggagttgggggggca

SEQ ID NO: 107172 - DNA, 80 bp, synthetic construct
  source 1..80: mol_type = other DNA
ttttatacagacagggtctcaatatattgcccaggctggtgtcaaactcctgggctcaagtgatcctcccacctcagcct

SEQ ID NO: 107173 - DNA, 80 bp, synthetic construct
  source 1..80: mol_type = other DNA
acttctgtcactcatagaggccagacttagttgcaaataaggagccatttgcaaatgtcagagtcttgttacataaatat

SEQ ID NO: 107174 - DNA, 80 bp, synthetic construct; identical to SEQ ID NO: 20803
  source 1..80: mol_type = other DNA

SEQ ID NO: 107175 - DNA, 80 bp, synthetic construct
  source 1..80: mol_type = other DNA
gcaaatcaacatagctgaatttgggagataggctcctactttaatatttgaagtagtttggcaattcctccactcggtaa

SEQ ID NO: 107176 - DNA, 80 bp, synthetic construct
  source 1..80: mol_type = other DNA
ggatgttcacatgccagcatgttcacctaaagcgagagtatatatgcaactggctgagatccaaagaaggaaactgtgct

SEQ ID NO: 107177 - DNA, 80 bp, synthetic construct
  source 1..80: mol_type = other DNA
caaggttcagtatcctcctctgtaaaacgggggtaagagaatctaactcatacatagggttattggagaaataaagtaga

SEQ ID NO: 107178 - DNA, 80 bp, synthetic construct; identical to SEQ ID NO: 20804
  source 1..80: mol_type = other DNA

SEQ ID NO: 107179 - DNA, 80 bp, synthetic construct
  source 1..80: mol_type = other DNA
agcctgtggaccccttctcactgtgatgttttttaaatgcataaaatagaacatggagtatttcaaagaaaaccaattac

SEQ ID NO: 107180 - DNA, 80 bp, synthetic construct
  source 1..80: mol_type = other DNA
gagcgtaagtcacatgctgagacgtctgcaacaacaaactcataggtacagctgatactaggaaatattaatttttaatt

SEQ ID NO: 107181 - DNA, 80 bp, synthetic construct
  source 1..80: mol_type = other DNA
gagctatatctggttcaatgttattactattcatggaaggtcccaatagtgcaacaattatgttttgagctctgctaaga

SEQ ID NO: 107182 - DNA, 80 bp, synthetic construct; identical to SEQ ID NO: 20805
  source 1..80: mol_type = other DNA

SEQ ID NO: 107183 - DNA, 80 bp, synthetic construct
  source 1..80: mol_type = other DNA
tgaactcctgcctcaagtaaagtaatcctcctgcctcagccaccgtaatagctgggactacaggaagcaccacagtgtct

SEQ ID NO: 107184 - DNA, 80 bp, synthetic construct
  source 1..80: mol_type = other DNA
ctctcaccaatatgaagtttagagatcaggtatggggttgagatcagaagtctctccaatcaggcaatgctcattgtaaa

SEQ ID NO: 107185 - DNA, 80 bp, synthetic construct
  source 1..80: mol_type = other DNA
cacacagccaggaacttagtaagtgttcagtttatgagtttctctgtaactggcggctgatgaaaagaagcatttcctgt

SEQ ID NO: 107186 - DNA, 80 bp, synthetic construct; identical to SEQ ID NO: 20806
  source 1..80: mol_type = other DNA

SEQ ID NO: 107187 - DNA, 80 bp, synthetic construct
  source 1..80: mol_type = other DNA
tcttcttcagtcagtgccacacataaacttaaggggatttctgtttttgtgtttcctttaggctaaaaaggaattgaaat

SEQ ID NO: 107188 - DNA, 80 bp, synthetic construct
  source 1..80: mol_type = other DNA
aaaaaaattgactacatattcacatttggccaaagtgaagtctctccagattctgccaatgaggttattaaaataacacc

SEQ ID NO: 107189 - DNA, 80 bp, synthetic construct
  source 1..80: mol_type = other DNA
gactatacaaaagcaggccatggacttctgagccatagtttgtcaaaccttgctgtaaaatataaaaaatttgagaagta

SEQ ID NO: 107190 - DNA, 80 bp, synthetic construct; identical to SEQ ID NO: 20807
  source 1..80: mol_type = other DNA

SEQ ID NO: 107191 - DNA, 80 bp, synthetic construct
  source 1..80: mol_type = other DNA
atacatctccacaagagcatcttttttttcttttgcattcaatcattctgtaattgctttgtcccaccccatttctgccc

SEQ ID NO: 107192 - DNA, 80 bp, synthetic construct
  source 1..80: mol_type = other DNA
aattctgatatcttggggttacttctctggttactagacccaagattttcatctagaatatatagtcagtggaagttggc

SEQ ID NO: 107193 - DNA, 80 bp, synthetic construct
  source 1..80: mol_type = other DNA
gccaaggcgggcagatcacaaggtcaggagttcaagaccagcctggccaacatggtgaaaccccgtctccactaaaaata

SEQ ID NO: 107194 - DNA, 80 bp, synthetic construct; identical to SEQ ID NO: 20808
  source 1..80: mol_type = other DNA

SEQ ID NO: 107195 - DNA, 80 bp, synthetic construct
  source 1..80: mol_type = other DNA
tgatttacatagggctcacagattggttcaatcaggtatgacgtttacatagtgcatggggaagactggtcaccccaccc

SEQ ID NO: 107196 - DNA, 80 bp, synthetic construct
  source 1..80: mol_type = other DNA
tctatgtctgaagctcaactttacaggctgctctttgttagaaaatgatttggggctgcttttcattaaaaagaaacacc

SEQ ID NO: 107197 - DNA, 80 bp, synthetic construct
  source 1..80: mol_type = other DNA
ctactgtaggtgaaaactgacaaatgaataatcaaaagatccttttctgacacggagtttggttccataccacctaccca

SEQ ID NO: 107198 - DNA, 80 bp, synthetic construct
  source 1..80: mol_type = other DNA
ctgtgccttccatgtttctctaagcttttccacattccactaatatatagattacattgtacatttagcccctatcccag

SEQ ID NO: 107199 - DNA, 80 bp, synthetic construct; identical to SEQ ID NO: 20809
  source 1..80: mol_type = other DNA

SEQ ID NO: 107200 - DNA, 80 bp, synthetic construct
  source 1..80: mol_type = other DNA
tcagcccacaggggcctgcttcagaattccaagtcaaaaaactgcagcatttccatttttaacttgttttacctttgcgg

SEQ ID NO: 107201 - DNA, 80 bp, synthetic construct
  source 1..80: mol_type = other DNA
tgctgatcagagcagaacaagttggagtttgaaaaagagcaaagattttggtgcaaactgtggcacgctctgtgttttta

SEQ ID NO: 107202 - DNA, 80 bp, synthetic construct
  source 1..80: mol_type = other DNA
aacactcagtaaatggtttgtctttttatttggcaatattgaggacctgctgtgtgctaagtgcagtttacagtagtgaa

SEQ ID NO: 107203 - DNA, 80 bp, synthetic construct; identical to SEQ ID NO: 20810
  source 1..80: mol_type = other DNA

SEQ ID NO: 107204 - DNA, 80 bp, synthetic construct
  source 1..80: mol_type = other DNA
tccaactccttctctccttgttttgtttccccatcagaatataacaccagcaatcctgacttgttgctagtcatatttca

SEQ ID NO: 107205 - DNA, 80 bp, synthetic construct
  source 1..80: mol_type = other DNA
ctggaagatgaccgctctgacatcagctccacgtgtgccaacaacatcaaccacaacacagagctgctgcccattgagct

SEQ ID NO: 107206 - DNA, 80 bp, synthetic construct; identical to SEQ ID NO: 20811
  source 1..80: mol_type = other DNA

SEQ ID NO: 107207 - DNA, 80 bp, synthetic construct
  source 1..80: mol_type = other DNA
tccatgtgggaggcccaagatgcccatcgtgcacagggacctcaagagctccaatatcctcgtgaagaacgacctaacct

SEQ ID NO: 107208 - DNA, 80 bp, synthetic construct
  source 1..80: mol_type = other DNA
tcaaacagccctgtactctggacactggtctagggaatctagccaaagtatggagtctgccttgagcatactctgctctg

SEQ ID NO: 107209 - DNA, 80 bp, synthetic construct
  source 1..80: mol_type = other DNA
ccctctcttatggttgtactcagtcctttctgctctatactagctgtagttgtgttggtttctttgtattaaaagcatcg

SEQ ID NO: 107210 - DNA, 80 bp, synthetic construct; identical to SEQ ID NO: 20812
  source 1..80: mol_type = other DNA

SEQ ID NO: 107211 - DNA, 80 bp, synthetic construct
  source 1..80: mol_type = other DNA
aaatatggacagactaatgtgccagagtaatgagccatgcaatgacctcttgagaagaaaaaaactctctaatacatgcc

SEQ ID NO: 107212 - DNA, 80 bp, synthetic construct
  source 1..80: mol_type = other DNA
atccgacgtttgcatattatcagtcatagagattagcacaggcctaaaagtcaaaataaaactacatggcccacaagtta

SEQ ID NO: 107213 - DNA, 80 bp, synthetic construct
  source 1..80: mol_type = other DNA
ttgtactatatcctttgcacactggaatgtgccatgggataaacaaagattaagactcagtcctaaagtgatcaaaactg

SEQ ID NO: 107214 - DNA, 80 bp, synthetic construct; identical to SEQ ID NO: 20813
  source 1..80: mol_type = other DNA

SEQ ID NO: 107215 - DNA, 80 bp, synthetic construct
  source 1..80: mol_type = other DNA
tattgtgaaaataaaaaggcagctggaattaaatgatgggcctcactgtctgtttttgctataggtgggaactgcaagat

SEQ ID NO: 107216 - DNA, 80 bp, synthetic construct
  source 1..80: mol_type = other DNA
acttgtcttcaaaataagatcatgtgttgcttcgagcattattccaggggttacaaagcagttattagagctagttgaga

SEQ ID NO: 107217 - DNA, 80 bp, synthetic construct
  source 1..80: mol_type = other DNA
tatctggcaagagacgaatactaataaatgtataagaattatctctaatgatcatgtgggtaatattcagataagcatct

SEQ ID NO: 107218 - DNA, 80 bp, synthetic construct; identical to SEQ ID NO: 20814
  source 1..80: mol_type = other DNA

SEQ ID NO: 107219 - DNA, 80 bp, synthetic construct
  source 1..80: mol_type = other DNA
gaccatgagactgtagatagaatgggcaacaaacatctggggtgccagggtgaggctattgttctaggaagtattatccc

SEQ ID NO: 107220 - DNA, 80 bp, synthetic construct
  source 1..80: mol_type = other DNA
gaactgcctttcgctgtctcctgtccactatgtgtttctattcatgtccttcttatttcttaggtgagacagggtcttag

SEQ ID NO: 107221 - DNA, 80 bp, synthetic construct
  source 1..80: mol_type = other DNA
ggttcaagcaattctcctagctcagcctcttgagtagctgagattacagacatgcaccaccacgctcagctaatatttgt

SEQ ID NO: 107222 - DNA, 80 bp, synthetic construct
  source 1..80: mol_type = other DNA
ttagacttagaaaatagttgtaaaaatagtggagtttctgtatactcttaactcaactttgcctgttgttaatatctaac

SEQ ID NO: 107223 - DNA, 80 bp, synthetic construct; identical to SEQ ID NO: 20815
  source 1..80: mol_type = other DNA

SEQ ID NO: 107224 - DNA, 80 bp, synthetic construct
  source 1..80: mol_type = other DNA
aaatttggtcctttggttaaagtgggacctgctgctatttgtccatttgtaagtaatacatgcctttgacctgtttctaa

SEQ ID NO: 107225 - DNA, 80 bp, synthetic construct
  source 1..80: mol_type = other DNA
atatgcattctcctttaaaaaagatctgtctcttctgacaccatcccctgttctttgtttactaattatgtatttatatc

SEQ ID NO: 107226 - DNA, 80 bp, synthetic construct
  source 1..80: mol_type = other DNA
tcctgttcagaatatgcatagccaattctccagcgtgggtccgggtcaccccctcccatcctgcaccctgctgaacctca

SEQ ID NO: 107227 - DNA, 80 bp, synthetic construct; identical to SEQ ID NO: 20816
  source 1..80: mol_type = other DNA

SEQ ID NO: 107228 - DNA, 80 bp, synthetic construct
  source 1..80: mol_type = other DNA
cattgttatcactgactaaaacccttgcctgttgatatttgctgagtgtggaagaatttaagctaatgaggaaggagttc

SEQ ID NO: 107229 - DNA, 80 bp, synthetic construct
  source 1..80: mol_type = other DNA
tttcgtttgatcttaagcccacagtcctatttctcccatctttgctcgggctgcagacaccaaggttatttatccatcct

SEQ ID NO: 107230 - DNA, 80 bp, synthetic construct; identical to SEQ ID NO: 20817
  source 1..80: mol_type = other DNA

SEQ ID NO: 107231 - DNA, 80 bp, synthetic construct
  source 1..80: mol_type = other DNA
atcttacaaattaaataatgaatccccctgtttgatgttagactttaattttaaggtataaggaagagggaaggatgtaa

SEQ ID NO: 107232 - DNA, 80 bp, synthetic construct
  source 1..80: mol_type = other DNA
gatgaatcatagatggacagtaaagggaaccagatctccagagtcatcttctctgtaggctctgagtctgtgtgcttgtg

SEQ ID NO: 107233 - DNA, 80 bp, synthetic construct
  source 1..80: mol_type = other DNA
gtggatcatgaggtcaggagatcgagaccatcctggctaacatggtgaaaccccgtctctactaaaaatacaaaaaaatt

SEQ ID NO: 107234 - DNA, 80 bp, synthetic construct; identical to SEQ ID NO: 20818
  source 1..80: mol_type = other DNA

SEQ ID NO: 107235 - DNA, 80 bp, synthetic construct
  source 1..80: mol_type = other DNA
ctctgttcccagttgttaatgagctattgcagaggtgactatttgttttactttcttggatgttaacattacagtactca

SEQ ID NO: 107236 - DNA, 80 bp, synthetic construct
  source 1..80: mol_type = other DNA
cgccacattctcattctgtgttcatcacttcatcatgatggatgtcttttaggtcttacctccaggctttgtctcatgct

SEQ ID NO: 107237 - DNA, 80 bp, synthetic construct
  source 1..80: mol_type = other DNA
cagctcttaaaggaagaggaagactctggggcatccttctgagttacttctttactagccagtctcccctgaatgcaggg

SEQ ID NO: 107238 - DNA, 80 bp, synthetic construct
  source 1..80: mol_type = other DNA
agttaggtgaagagagtggtcagagagaaaggcttcttattgaaagtacatttggtccagataaagaaagccataaagga

SEQ ID NO: 107239 - DNA, 80 bp, synthetic construct; identical to SEQ ID NO: 20819
  source 1..80: mol_type = other DNA

SEQ ID NO: 107240 - DNA, 80 bp, synthetic construct
  source 1..80: mol_type = other DNA
ctgtaatcgcagctactcaagaggctgaggcagagaattgcttgaacccgggaggcggaggttgcagtgagctgagatcg

SEQ ID NO: 107241 - DNA, 80 bp, synthetic construct
  source 1..80: mol_type = other DNA
agacaatcacatgtttgaggaacattcagtgatggcctcacttctctgggtgaatccctgttaacagaatccaaggctgt

SEQ ID NO: 107242 - DNA, 80 bp, synthetic construct; identical to SEQ ID NO: 20820
  source 1..80: mol_type = other DNA

SEQ ID NO: 107243 - DNA, 80 bp, synthetic construct
  source 1..80: mol_type = other DNA
attgtttgaagtaagaacaagacaagaggaggtgattggtgtgttactgttctacgaaaaaggagaaaaagcttcatgaa

SEQ ID NO: 107244 - DNA, 80 bp, synthetic construct
  source 1..80: mol_type = other DNA
tttacaaagaaatctctgtcccaggctttcagtctgtttggtgttcatacaagtgtttgtgtgttgtgtggaaggcgggt

SEQ ID NO: 107245 - DNA, 80 bp, synthetic construct
  source 1..80: mol_type = other DNA
acaagtatttaatgaggagcaacacaactccaagaagggctccttagtgtattgtcaagttgctgcagccttgtgagatg

SEQ ID NO: 107246 - DNA, 80 bp, synthetic construct; identical to SEQ ID NO: 20821
  source 1..80: mol_type = other DNA

SEQ ID NO: 107247 - DNA, 80 bp, synthetic construct
  source 1..80: mol_type = other DNA
tggaactgggaagagacaggcaagcgtagttttctcttaagagccttttgagacaaattaaaagaagctgcgagggccgg

SEQ ID NO: 107248 - DNA, 80 bp, synthetic construct
  source 1..80: mol_type = other DNA
tctgtctggcttcagaaacagtctgagggtgagacaaagacttggtttgatgaactaattctgctgtgtaggcatatgtc

SEQ ID NO: 107249 - DNA, 80 bp, synthetic construct
  source 1..80: mol_type = other DNA
actggagtataactacgagcagaacacacacctcagtgtcataccacctgactcaaaggaagctgggtgttttatctttc

SEQ ID NO: 107250 - DNA, 80 bp, synthetic construct
  source 1..80: mol_type = other DNA
gaataattgtagggggcatatgtgactattcttattttgtggatataggaagtgaggcacaaactcttggcatctctttt

SEQ ID NO: 107251 - DNA, 80 bp, synthetic construct; identical to SEQ ID NO: 20822
  source 1..80: mol_type = other DNA

SEQ ID NO: 107252 - DNA, 80 bp, synthetic construct
  source 1..80: mol_type = other DNA
tccctaaacccagaaaggacaagtgtttgggtttaatgtgggtaaataataccagctaaggagagggctgctctttgtaa

SEQ ID NO: 107253 - DNA, 80 bp, synthetic construct
  source 1..80: mol_type = other DNA
aatgcttggcagagatgagcaagcatgaaagcttcctaaaaaggcaaaggcaaatttcttcagagtaacagtaataaagt

SEQ ID NO: 107254 - DNA, 80 bp, synthetic construct; identical to SEQ ID NO: 20823
  source 1..80: mol_type = other DNA

SEQ ID NO: 107255 - DNA, 80 bp, synthetic construct
  source 1..80: mol_type = other DNA
ccaatgaattgagggcaaaacatctgggcttttataaaaaattgattgagaagtgctcatttgcaagtaataagggaaaa

SEQ ID NO: 107256 - DNA, 80 bp, synthetic construct
  source 1..80: mol_type = other DNA
ccatcatgaaaaataaataagatacacagtttggacccaaagattttgccaaagtggattaaacatcccagtctccagct

SEQ ID NO: 107257 - DNA, 80 bp, synthetic construct
  source 1..80: mol_type = other DNA
ctttctgctttctaacctcctctcgcagggttcaggctatctctggccacgatcttcccttcttctgctgagtcaaagca

SEQ ID NO: 107258 - DNA, 80 bp, synthetic construct
  source 1..80: mol_type = other DNA
gttgcctgatcgctgcaattgaatatcaaagatgttaactgagaggcacatgtatacacactgccaaacattaaaccatc

SEQ ID NO: 107259 - DNA, 80 bp, synthetic construct; identical to SEQ ID NO: 20824
  source 1..80: mol_type = other DNA

SEQ ID NO: 107260 - DNA, 80 bp, synthetic construct
  source 1..80: mol_type = other DNA
ctgaaaaactaatattaaaggattagagtatgacagtttaggtcaaatgatgatcctccctccccagacttgtctatttt

SEQ ID NO: 107261 - DNA, 80 bp, synthetic construct
  source 1..80: mol_type = other DNA
gggagtctcacaactttccaagattttaggaaaagtaggaagtaacctatttataagtctgtttgttttgggaagggatt

SEQ ID NO: 107262 - DNA, 80 bp, synthetic construct; identical to SEQ ID NO: 20825
  source 1..80: mol_type = other DNA

SEQ ID NO: 107263 - DNA, 80 bp, synthetic construct
  source 1..80: mol_type = other DNA
atgaaagctttctagaaaggtaaaggagtttcatcagagtaacggtaatacaatgtgagattcagaatgttcttcctggt

SEQ ID NO: 107264 - DNA, 80 bp, synthetic construct
  source 1..80: mol_type = other DNA
agtctgacacacttttgtgcaatgatttattgaggataagctctcatgagaaggaagtaagagaagcaggaagaggcatg

SEQ ID NO: 107265 - DNA, 80 bp, synthetic construct
  source 1..80: mol_type = other DNA
ttaaacttcaacattaatttgtcatcggctatacgctgcctctgagagtaaggcggtcatgtccacgaatctctaggata

SEQ ID NO: 107266 - DNA, 80 bp, synthetic construct; identical to SEQ ID NO: 20826
  source 1..80: mol_type = other DNA

SEQ ID NO: 107267 - DNA, 80 bp, synthetic construct
  source 1..80: mol_type = other DNA
agaagaagtacatgagagtaaacacttactgggaaccagatctgattctcagttttctcttttgcttgaattcaaccgaa

SEQ ID NO: 107268 - DNA, 80 bp, synthetic construct
  source 1..80: mol_type = other DNA
aaatcacaattcagatctcacccaagagcaatgtggattaaatgcttgggtcctttgaggcaaaaagcatgacacacagg

SEQ ID NO: 107269 - DNA, 80 bp, synthetic construct
  source 1..80: mol_type = other DNA
aatgaacaaagaacaaaaacaagccgtcccttttcaaaatgtcatcttgccatgaaagcttcttcaattcgttacctaga

SEQ ID NO: 107270 - DNA, 80 bp, synthetic construct
  source 1..80: mol_type = other DNA
tcctgtgctctgtttacactatattaatctgctcatttaaattggtgttttgttttaatgtttggccagagtttatgcac

SEQ ID NO: 107271 - DNA, 80 bp, synthetic construct; identical to SEQ ID NO: 20827
  source 1..80: mol_type = other DNA

SEQ ID NO: 107272 - DNA, 80 bp, synthetic construct
  source 1..80: mol_type = other DNA
gttgttaatctgtcccctctgtcttcccactaaaacagcatttctcaaccttttttaaaatcagtgatatcgtaaggagc

SEQ ID NO: 107273 - DNA, 80 bp, synthetic construct
  source 1..80: mol_type = other DNA
gcctgtagacaactttttttctaaacactactctccatgatgtttttctgtagcaaaataggcataatataaaatgtacc

SEQ ID NO: 107274 - DNA, 80 bp, synthetic construct; identical to SEQ ID NO: 20828
  source 1..80: mol_type = other DNA

SEQ ID NO: 107275 - DNA, 80 bp, synthetic construct
  source 1..80: mol_type = other DNA
tttttatgcctcaatacctacatgaaatttaataccacattttaaatctctttgtatactctgggcctttggaggctcac

SEQ ID NO: 107276 - DNA, 80 bp, synthetic construct
  source 1..80: mol_type = other DNA
tgttgtccactgtgtcccccagcgtaacacctagcacattttaagtactcaacaatcatttattgaatacttctctagcc

SEQ ID NO: 107277 - DNA, 80 bp, synthetic construct
  source 1..80: mol_type = other DNA
ctcatttcctttggctgcacatgccattctcagtgaccctgtgtttgctggctttcttcacagaagtaaaagattatgag

SEQ ID NO: 107278 - DNA, 80 bp, synthetic construct
  source 1..80: mol_type = other DNA
cttaggtggcagagaattctggaatattgagcttaaatctgagggaaggtcccattgtgttctatggccctgttaaattt

SEQ ID NO: 107279 - DNA, 80 bp, synthetic construct; identical to SEQ ID NO: 20829
  source 1..80: mol_type = other DNA

SEQ ID NO: 107280 - DNA, 80 bp, synthetic construct
  source 1..80: mol_type = other DNA
gagaccgactcctcactctggaattaaggaaagcaaagaagaggagaatgccctggaaggaacgagaaatctgtctgttg

SEQ ID NO: 107281 - DNA, 80 bp, synthetic construct
  source 1..80: mol_type = other DNA
tttgatgagggcaatggtcagagaaaaaagaaaacgataggttgtgagtgagtcagaaccagctatatgtctgacacacc

SEQ ID NO: 107282 - DNA, 80 bp, synthetic construct; identical to SEQ ID NO: 20830
  source 1..80: mol_type = other DNA

SEQ ID NO: 107283 - DNA, 80 bp, synthetic construct
  source 1..80: mol_type = other DNA
agaatgtgctggagtgttatgtttctttcaaactctgttgcctcctctgctgtatagttctcgtaatgatgccattattc

SEQ ID NO: 107284 - DNA, 80 bp, synthetic construct
  source 1..80: mol_type = other DNA
gcactctactcttaacagggccatctgtcaatactgtcaattaggtgaattatgcaattaatttaacatcatgaactcat

SEQ ID NO: 107285 - DNA, 80 bp, synthetic construct
  source 1..80: mol_type = other DNA
aattgggaggagcacactctatttccacctatcagaccatttacttaactcctgcctgctttatttccaaaaaggatttg

SEQ ID NO: 107286 - DNA, 80 bp, synthetic construct
  source 1..80: mol_type = other DNA
gacccacataggcagctgtttcacagggttcaacccaatgttgttggagaggaatggagcatcccagaggtcatccttgg

SEQ ID NO: 107287 - DNA, 80 bp, synthetic construct; identical to SEQ ID NO: 20831
  source 1..80: mol_type = other DNA

SEQ ID NO: 107288 - DNA, 80 bp, synthetic construct
  source 1..80: mol_type = other DNA
ataacaaatgtacctcatagatgcatgcatgatgtcaaggtggagaaggctgtgcctttatggggaaggggttttgtgaa

SEQ ID NO: 107289 - DNA, 80 bp, synthetic construct
  source 1..80: mol_type = other DNA
aacttctctaaatagaaaggtgttgaaatgatattaagggccactacatggggaattttcaggtgttgggagtgttagtg

SEQ ID NO: 107290 - DNA, 80 bp, synthetic construct; identical to SEQ ID NO: 20832
  source 1..80: mol_type = other DNA

SEQ ID NO: 107291 - DNA, 80 bp, synthetic construct
  source 1..80: mol_type = other DNA
gcatctggacaggctctcggggaggagctgctcggaggagaagattcctgaagacggctccctaaacactaccaaatagc

SEQ ID NO: 107292 - DNA, 80 bp, synthetic construct
  source 1..80: mol_type = other DNA
agtgggtgacatagagcattctatgcctttgacattgtcataggataagctgtgttagcacttcctcaggaaatgagatt

SEQ ID NO: 107293 - DNA, 80 bp, synthetic construct
  source 1..80: mol_type = other DNA
ataccttgaaaagagacaaggaaaaacatcaaatattcccaggaaattggttttattggagaactccagaaccaagcaga

SEQ ID NO: 107294 - DNA, 80 bp, synthetic construct; identical to SEQ ID NO: 20833
  source 1..80: mol_type = other DNA

SEQ ID NO: 107295 - DNA, 80 bp, synthetic construct
  source 1..80: mol_type = other DNA
gaaactctaccccatctttaataccttgaatgttttgaaccccactttttaccttcatgggttgcagaaaaatcagaaca

SEQ ID NO: 107296 - DNA, 80 bp, synthetic construct
  source 1..80: mol_type = other DNA
cattacacttgacttgattttctagttttctatacaaacaccaatgggttccatctttctgggctcctgattgctcaagc

SEQ ID NO: 107297 - DNA, 80 bp, synthetic construct
  source 1..80: mol_type = other DNA
ccccaggtaaggatagcagatggttttcagttatctccagtccacgttcacaaaatgtgaaggtgtggagacacttacaa

SEQ ID NO: 107298 - DNA, 80 bp, synthetic construct
  source 1..80: mol_type = other DNA
tgttaagatttgaagttggccttttattggactaaaggggaactcctttaagggtctcagttagcccaagtttcttttgc

SEQ ID NO: 107299 - DNA, 80 bp, synthetic construct; identical to SEQ ID NO: 20834
  source 1..80: mol_type = other DNA

SEQ ID NO: 107300 - DNA, 80 bp, synthetic construct
  source 1..80: mol_type = other DNA
ggtctcattttattgagatttttaagatacatgcaaaggtttggaaatagaacctctaggcaccctcctcagtgtgggtg

SEQ ID NO: 107301 - DNA, 80 bp, synthetic construct
  source 1..80: mol_type = other DNA
aagagtattctcacttctgggttatcagcataaactggaatgtagtgtcagaggatactgtggcttgttttgtttatgtt

SEQ ID NO: 107302 - DNA, 80 bp, synthetic construct; identical to SEQ ID NO: 20835
  source 1..80: mol_type = other DNA

SEQ ID NO: 107303 - DNA, 80 bp, synthetic construct
  source 1..80: mol_type = other DNA
tattaaaataaaacccatccaccaccccaaggttattccagaaggaaactctccaccaatagtggtggcactagacatat

SEQ ID NO: 107304 - DNA, 80 bp, synthetic construct
  source 1..80: mol_type = other DNA
attctcagacacctgtacaaccccttaagccagacggactcacagctgtctctggaaagttcttcgttacctgactcttt

SEQ ID NO: 107305 - DNA, 80 bp, synthetic construct; identical to SEQ ID NO: 20836
  source 1..80: mol_type = other DNA

SEQ ID NO: 107306 - DNA, 80 bp, synthetic construct
  source 1..80: mol_type = other DNA
cctgccaccatgcctggttaatttttgtatttttagtagagacggggtttcaccatgttggccagaatggtctcgatctc

SEQ ID NO: 107307 - DNA, 80 bp, synthetic construct
  source 1..80: mol_type = other DNA
tcttaattctcaaaccagtaaccctaatgaagcgtcttcgtttcaggtgggctcattcaaaacgacattttcaggcttgg

SEQ ID NO: 107308 - DNA, 80 bp, synthetic construct
  source 1..80: mol_type = other DNA
attaaaatgtcactccccccaaaaaatgcagaggaagaggtaagattgcaggctatttgaaaacaggggcatgaagtttg

SEQ ID NO: 107309 - DNA, 80 bp, synthetic construct; identical to SEQ ID NO: 20837
  source 1..80: mol_type = other DNA

SEQ ID NO: 107310 - DNA, 80 bp, synthetic construct
  source 1..80: mol_type = other DNA
actttcaacaccctcacttaaggccaggcagaacccttcctactgtcaccagtcattaaaataaggttgcatccctccct

SEQ ID NO: 107311 - DNA, 80 bp, synthetic construct
  source 1..80: mol_type = other DNA
tcactcccacatcaagtgtggctcaagctgcgtcctccaggaagcctttcattatcactcaggtcagaactggctccctt

SEQ ID NO: 107312 - DNA, 80 bp, synthetic construct
  source 1..80: mol_type = other DNA
atggacatgaaatgagaacacactcccagcttccaagaaagatgtgtattctccctaacaacaacaaaagagacctaaat

SEQ ID NO: 107313 - DNA, 80 bp, synthetic construct; identical to SEQ ID NO: 20838
  source 1..80: mol_type = other DNA

SEQ ID NO: 107314 - DNA, 80 bp, synthetic construct
  source 1..80: mol_type = other DNA
ttgggcgggagtcagctactatttctagctgttctagaaagacctagaaacttcctgtgtgaaaacaggattaggaagct

SEQ ID NO: 107315 - DNA, 80 bp, synthetic construct
  source 1..80: mol_type = other DNA
tccagaccagcctggccaacatggtgaaaccctgtctctactaaaaatacaaaaaaattatctgggcatagtggcgcatg

SEQ ID NO: 107316 - DNA, 80 bp, synthetic construct
  source 1..80: mol_type = other DNA
aaatacagcctcatcaacatctcctgcttctctgagacaaagggaacaaaccaaatcaggaaaatcgtgacagaaaaatg

SEQ ID NO: 107317 - DNA, 80 bp, synthetic construct; identical to SEQ ID NO: 20839
  source 1..80: mol_type = other DNA

SEQ ID NO: 107318 - DNA, 80 bp, synthetic construct
  source 1..80: mol_type = other DNA
agtaaacctgccaatgacaaactcaggacttaacagaaagacttagttcagttccttggctttgtgctcaggcatcacat

SEQ ID NO: 107319 - DNA, 80 bp, synthetic construct
  source 1..80: mol_type = other DNA
tttctagccacagcttcatagtgttgtccattctccagtcttgctcaaactatctatcaccttaaaggttggaagagatt

SEQ ID NO: 107320 - DNA, 80 bp, synthetic construct; identical to SEQ ID NO: 20840
  source 1..80: mol_type = other DNA

SEQ ID NO: 107321 - DNA, 80 bp, synthetic construct
  source 1..80: mol_type = other DNA
agggtggtgggttcctgccctgttgtggcccctgttcctaaactgaggccaggttccatctcagtgctgcagtcctgagg

SEQ ID NO: 107322 - DNA, 80 bp, synthetic construct
  source 1..80: mol_type = other DNA
gagctacagccccaaatattgcagagccaaaaggaatgggatacatgtctaaaaagtgacaacagtcttgtccctatttt

SEQ ID NO: 107323 - DNA, 80 bp, synthetic construct
  source 1..80: mol_type = other DNA
ctccttgcctgggctccagccacatgaagcaagggcagagagggttgcaactgctctgccttcccaacagcgattccctc

SEQ ID NO: 107324 - DNA, 80 bp, synthetic construct
  source 1..80: mol_type = other DNA
gcaaacactgatccctgtgaagtgagcctccagggcacagtcccctttcccttgggccctttgacacttgtttttgggac

SEQ ID NO: 107325 - DNA, 80 bp, synthetic construct; identical to SEQ ID NO: 20841
  source 1..80: mol_type = other DNA

SEQ ID NO: 107326 - DNA, 80 bp, synthetic construct
  source 1..80: mol_type = other DNA
gggggtggctggaactggttgatgacctcatattccgccgggtagggctcgttctcttccatctctgagagcagctccag

SEQ ID NO: 107327 - DNA, 80 bp, synthetic construct
  source 1..80: mol_type = other DNA
atgagttcagaagcccaataagaaaagccaatgacggtggcacactgcagaactaggagacagagggacagcacagaagg

SEQ ID NO: 107328 - DNA, 80 bp, synthetic construct
  source 1..80: mol_type = other DNA
gcagtctgacctgatctaggccagtcagattccatctgtcttaaggagcaaatagggtcatgcagcttgggagctggagt

SEQ ID NO: 107329 - DNA, 80 bp, synthetic construct; identical to SEQ ID NO: 20842
  source 1..80: mol_type = other DNA

SEQ ID NO: 107330 - DNA, 80 bp, synthetic construct
  source 1..80: mol_type = other DNA
agcccccaccggcaactcagacaggatgcccccaccctgtagcagttcctctcccactgtgagcaggctcacggcttacc

SEQ ID NO: 107331 - DNA, 80 bp, synthetic construct
  source 1..80: mol_type = other DNA
attcatgcagaaatctgtagagggagaaccaaattttcacggccccaagtaacacttggtgcaggaagtccccacctaga

SEQ ID NO: 107332 - DNA, 80 bp, synthetic construct; identical to SEQ ID NO: 20843
  source 1..80: mol_type = other DNA

SEQ ID NO: 107333 - DNA, 80 bp, synthetic construct
  source 1..80: mol_type = other DNA
acagccagagaggctaagaccatacaggtcaattaatgctgattctccatttactcactcattcattccctttttgttcc

SEQ ID NO: 107334 - DNA, 80 bp, synthetic construct
  source 1..80: mol_type = other DNA
tagggagaggggagaacaggaagttatcatttaatgtgcacaaaggttcagtttgaaatgatgatagttttggaaacaga

SEQ ID NO: 107335 - DNA, 80 bp, synthetic construct
  source 1..80: mol_type = other DNA
aaaaaaattagctgggcatggtggcgcatgcctatagtcttagctccttaggaggctgaggcaagaggactgcttgcgcc

SEQ ID NO: 107336 - DNA, 80 bp, synthetic construct
  source 1..80: mol_type = other DNA
cgaggtcagaagatcgagaccatcttggccaacatggtgaaaccccgtctctaccaaaaatacaaaaattagctgggtgt

SEQ ID NO: 107337 - DNA, 80 bp, synthetic construct; identical to SEQ ID NO: 20844
  source 1..80: mol_type = other DNA

SEQ ID NO: 107338 - DNA, 80 bp, synthetic construct
  source 1..80: mol_type = other DNA
tgagccgagattgcgccttcacactccagcatgggcaacaagagagaaactctgtctcaaaaaaaaaaaaaaaaaaagtt

SEQ ID NO: 107339 - DNA, 80 bp, synthetic construct
  source 1..80: mol_type = other DNA
cacatttagtttagctccctccctgaactctacgagaacaaaagaattcttttaaaaggcaacccacacaaaaagaaagg

SEQ ID NO: 107340 - DNA, 80 bp, synthetic construct; identical to SEQ ID NO: 20845
  source 1..80: mol_type = other DNA

SEQ ID NO: 107341 - DNA, 80 bp, synthetic construct
  source 1..80: mol_type = other DNA
gagttcgacatcagcgtggccaacatggtgaaaccccgtctctactaaaaatacaaaaattagccggccgtggtggcgcg

SEQ ID NO: 107342 - DNA, 80 bp, synthetic construct
  source 1..80: mol_type = other DNA
tagatgatactgtctgtctcctttgataactatgcaaactgcaaaagctcccagaagcatagggtagaataaaggctgaa

SEQ ID NO: 107343 - DNA, 80 bp, synthetic construct
  source 1..80: mol_type = other DNA
tgaaaccctgtctctactaaaaatttaaaaaatcagccaggtatggtggcgtgcacctgtagtcccagctactcaggagg

SEQ ID NO: 107344 - DNA, 80 bp, synthetic construct; identical to SEQ ID NO: 20846
  source 1..80: mol_type = other DNA

SEQ ID NO: 107345 - DNA, 80 bp, synthetic construct
  source 1..80: mol_type = other DNA
aatctggattttaacaagcagcccaggtaatccccatgcaggtgatccaagccccacacttcaagaaacactggttccag

SEQ ID NO: 107346 - DNA, 80 bp, synthetic construct
  source 1..80: mol_type = other DNA
ctcagagttcgcccagcagaggctggctgggcccagacaaggctcatacacctctgtctggctttgggtcacccacgaag

SEQ ID NO: 107347 - DNA, 80 bp, synthetic construct
  source 1..80: mol_type = other DNA
atagtgcatggggcctcactgaaagaaaagctctaggagacaggggctatctcctggctgtattttaaatcttattaaaa

SEQ ID NO: 107348 - DNA, 80 bp, synthetic construct; identical to SEQ ID NO: 20847
  source 1..80: mol_type = other DNA

SEQ ID NO: 107349 - DNA, 80 bp, synthetic construct
  source 1..80: mol_type = other DNA
cctctccaaaggcaaatattgttggaggggccttgtatacccctcctggaacagcctgtgcacacagatgggtgaagtgc

SEQ ID NO: 107350 - DNA, 80 bp, synthetic construct
  source 1..80: mol_type = other DNA
tgtatttttccctggagataatcaatcaattcctaaagagttgtgcgtgaatgaggggtcagaagctaacaggaatactg

SEQ ID NO: 107351 - DNA, 80 bp, synthetic construct
  source 1..80: mol_type = other DNA
agctgctaagctcactagaggaacagcttgaagcaatgaaatctctctaagaagcaaaaaaggtttgggtcattaagtcc

SEQ ID NO: 107352 - DNA, 80 bp, synthetic construct
  source 1..80: mol_type = other DNA
gagactgtgttactttgagcaagtcccttgagtgcgctggacctctgttctctcatctatcaaatgaaaacaataacatc

SEQ ID NO: 107353 - DNA, 80 bp, synthetic construct; identical to SEQ ID NO: 20848
  source 1..80: mol_type = other DNA

SEQ ID NO: 107354 - DNA, 80 bp, synthetic construct
  source 1..80: mol_type = other DNA
actccaaagctgtgagtaaaccctcagggttagtgagaaaaccaaatatgaaattccctttgggtaacgttaacagatac

SEQ ID NO: 107355 - DNA, 80 bp, synthetic construct
  source 1..80: mol_type = other DNA
aaggcaacaagcacctgctcccatgaggggattgctaaagaaaacccctgaaggttatgtatgtaggattttattcgaga

SEQ ID NO: 107356 - DNA, 80 bp, synthetic construct
  source 1..80: mol_type = other DNA
agtaggcagctgtaataggatcccatggaactgactttgctcaaggtcactggtgagtcaccaggctagatttgttttga

SEQ ID NO: 107357 - DNA, 80 bp, synthetic construct
  source 1..80: mol_type = other DNA
agagacacttccccaatgccccaatccctctttatgcatctgtgcaacctgctcagcgtctcctcactgtgaccttttta

SEQ ID NO: 107358 - DNA, 80 bp, synthetic construct; identical to SEQ ID NO: 20849
  source 1..80: mol_type = other DNA

SEQ ID NO: 107359 - DNA, 80 bp, synthetic construct
  source 1..80: mol_type = other DNA
tgagagctgtgtgagaagcaggcaccgcttgcaggggcagtggagaaaacccaggatgaggtctttttttttttttttta

SEQ ID NO: 107360 - DNA, 80 bp, synthetic construct
  source 1..80: mol_type = other DNA
taaagcctcaacactgaggcgatgaagttatgacaaaaagcacagctttggctgggcttatgataaaactcaactagaat

SEQ ID NO: 107361 - DNA, 80 bp, synthetic construct; identical to SEQ ID NO: 20850
  source 1..80: mol_type = other DNA

SEQ ID NO: 107362 - DNA, 80 bp, synthetic construct
  source 1..80: mol_type = other DNA
gccaaggtgggtggatcacctgaggtcaggagtttgagatcagcctggtcaacaaggtgaaacctcatctctacgaaaag

SEQ ID NO: 107363 - DNA, 80 bp, synthetic construct
  source 1..80: mol_type = other DNA
aaaaaaaaaaaaaaaaaactctatatgcaccacatctgtgcttgacagctctgctccctcttgagatgtggaatactcca

SEQ ID NO: 107364 - DNA, 80 bp, synthetic construct
  source 1..80: mol_type = other DNA
attccttactgattcttctgtgatagctcatgaggcaccactgccaactctcctattaatgggcacaaactgctcttagg

SEQ ID NO: 107365 - DNA, 80 bp, synthetic construct
  source 1..80: mol_type = other DNA
tagcccaggctggagtgcagtagtgtgatctgggctcactgcaacctcacctcccaggttcaagcgattctcctgcctca

SEQ ID NO: 107366 - DNA, 80 bp, synthetic construct; identical to SEQ ID NO: 20851
  source 1..80: mol_type = other DNA

SEQ ID NO: 107367 - DNA, 80 bp, synthetic construct
  source 1..80: mol_type = other DNA
ccagctaatttttgtatttttagtagagacagggtttctttcaccatgttagccaagctggtctccaactcttgacctca

SEQ ID NO: 107368 - DNA, 80 bp, synthetic construct
  source 1..80: mol_type = other DNA
caccacgcccggctcaaaaatttacttttatttttaacatgccttcgacaaggatgcacaccaaagtgaaataattatga

SEQ ID NO: 107369 - DNA, 80 bp, synthetic construct; identical to SEQ ID NO: 20852
  source 1..80: mol_type = other DNA

SEQ ID NO: 107370 - DNA, 80 bp, synthetic construct
  source 1..80: mol_type = other DNA
ataactttggctttaatgagccaacccagcaaagagtaccattaaggtgaaatctggaaacaaccagttgtccccaacct

SEQ ID NO: 107371 - DNA, 80 bp, synthetic construct
  source 1..80: mol_type = other DNA
ttggaccttttcaccaaatcccagtgcctgaattcttcaggaggtaacacgcagatatctaacaggaagtgcttctgata

SEQ ID NO: 107372 - DNA, 80 bp, synthetic construct
  source 1..80: mol_type = other DNA
gtaaaaagcaggtgatacagtccagtcctgtcctcacacttcacaatttttactggagacaagaatgggcaggataaact

SEQ ID NO: 107373 - DNA, 80 bp, synthetic construct
  source 1..80: mol_type = other DNA
cttccgattacctaaaatgccacagattcccttcttctctaatacgcatccgattaccatagaactctaagatatctttt

SEQ ID NO: 107374 - DNA, 80 bp, synthetic construct; identical to SEQ ID NO: 20853
  source 1..80: mol_type = other DNA

SEQ ID NO: 107375 - DNA, 80 bp, synthetic construct
  source 1..80: mol_type = other DNA
tcacctttcagcaggtccgggtgcacatagcccaacacgtcggagacccccagctcctggcgcgaacaggtgcctccgtg

SEQ ID NO: 107376 - DNA, 80 bp, synthetic construct
  source 1..80: mol_type = other DNA
gcgtacatgcccggggccgcccgccgtcgctccgcagtcgctgctggtcgccgccgacctccgcggggcgcgcagagcct

SEQ ID NO: 107377 - DNA, 80 bp, synthetic construct
  source 1..80: mol_type = other DNA
tgggactgcgggacgacaaccgaagagggccaggggccagatggggtctgggcagactcgagtggggggcggagggatcg

SEQ ID NO: 107378 - DNA, 80 bp, synthetic construct; identical to SEQ ID NO: 20854
  source 1..80: mol_type = other DNA

SEQ ID NO: 107379 - DNA, 80 bp, synthetic construct
  source 1..80: mol_type = other DNA
cgctggacaccacgctccagtcgtcagcccacttcctagctgaacagcgcgaggcggcggcagcgagccgggtcccacca

SEQ ID NO: 107380 - DNA, 80 bp, synthetic construct
  source 1..80: mol_type = other DNA
gccagctcatccctctgctcatctcgcggcctgtccaggcttcttttgtccgtgttccttggctcgcctcgtcctcggcg

SEQ ID NO: 107381 - DNA, 80 bp, synthetic construct
  source 1..80: mol_type = other DNA
ccttgggagggaggaaggcgatccagcccaagtggagctgtccagcaatggacagacagggctgtccaggcgggcagaga

SEQ ID NO: 107382 - DNA, 80 bp, synthetic construct; identical to SEQ ID NO: 20855
  source 1..80: mol_type = other DNA

SEQ ID NO: 107383 - DNA, 80 bp, synthetic construct
  source 1..80: mol_type = other DNA
cacaccctatttccagacaccgcctctgtccccaagcgtcctctctgcctcccacaccccttgagaggccagggtgtgca

SEQ ID NO: 107384 - DNA, 80 bp, synthetic construct
  source 1..80: mol_type = other DNA
gagaccagcctgtctgtagtatgtggactctttgtctgctcccatcactaccaccaccatattttacagatggggaactt

SEQ ID NO: 107385 - DNA, 80 bp, synthetic construct; identical to SEQ ID NO: 20856
  source 1..80: mol_type = other DNA

SEQ ID NO: 107386 - DNA, 80 bp, synthetic construct
  source 1..80: mol_type = other DNA
aggaatatacatgcatttgagtattctctgctgccaagcattttttgattcatccagtagctgagtacacatttacagca

SEQ ID NO: 107387 - DNA, 80 bp, synthetic construct
  source 1..80: mol_type = other DNA
atttacccaggcttacacagcaagcgattggtgaacctaggcatcaaatccagttctgtccatttccagggcctatgtgt

SEQ ID NO: 107388 - DNA, 80 bp, synthetic construct
  source 1..80: mol_type = other DNA
atgtgtggatatatagatcctttatgatcctccatgtttactgggaattttggttcagaatgtgggctgggtttgtcatg

SEQ ID NO: 107389 - DNA, 80 bp, synthetic construct
  source 1..80: mol_type = other DNA
cacagactggaatgagtaatgggagagtagcctccagtctgcccggatttgaatcctaactcttcctcttagaagctgtg

SEQ ID NO: 107390 - DNA, 80 bp, synthetic construct; identical to SEQ ID NO: 20857
  source 1..80: mol_type = other DNA

SEQ ID NO: 107391 - DNA, 80 bp, synthetic construct
  source 1..80: mol_type = other DNA
ttttgtcagctcacccccagcctggtgccagcccagtatcagttgtagggaaatctggtaacatttctactagctaacac

SEQ ID NO: 107392 - DNA, 80 bp, synthetic construct
  source 1..80: mol_type = other DNA
aaatgcaaacccagttcttctggctccagaatcctgccctagacgatgacacttttgatcagcagtggatgcaccccaaa

SEQ ID NO: 107393 - DNA, 80 bp, synthetic construct
  source 1..80: mol_type = other DNA
cacttcctacttcctcatcactgctgatacggttctccctttagggatgctcttcccctaagatctgcctctaagattcc

SEQ ID NO: 107394 - DNA, 80 bp, synthetic construct; identical to SEQ ID NO: 20858
  source 1..80: mol_type = other DNA

SEQ ID NO: 107395 - DNA, 80 bp, synthetic construct
  source 1..80: mol_type = other DNA
aaaaagttaaacgtacatcttcttcacgagccagcagttgtactcctaggtatattcctacgggaaatgaaagcacatgt

SEQ ID NO: 107396 - DNA, 80 bp, synthetic construct
  source 1..80: mol_type = other DNA
aaattcctgataaacaccacaacatgaatgaattgcaaaagcagtgctctgagtccaagaagctgggcagaaaggagttg

SEQ ID NO: 107397 - DNA, 80 bp, synthetic construct
  source 1..80: mol_type = other DNA
ttggggtgatggaaatattttgtaccttgctttagatgttggtcagatggaatatacgtttgtggaaacctgccaaactg

SEQ ID NO: 107398 - DNA, 80 bp, synthetic construct
  source 1..80: mol_type = other DNA
attctgttactgtttctttttcttcagtattccagtaccagtacccggagagaacatgtcaaagttaaaaccagctccca

SEQ ID NO: 107399 - DNA, 80 bp, synthetic construct; identical to SEQ ID NO: 20859
  source 1..80: mol_type = other DNA

SEQ ID NO: 107400 - DNA, 80 bp, synthetic construct
  source 1..80: mol_type = other DNA
tttcttcatcttttgcctgtttttctctattatggtgtttttcttgggcaggcacttcatctgtgatggcaaatgtggcc

SEQ ID NO: 107401 - DNA, 80 bp, synthetic construct
  source 1..80: mol_type = other DNA
tttaatagggcctcatgatgcaacagtatatttctaaatcaatttagcagcagttacagggccatctctcagtgtcctgg

SEQ ID NO: 107402 - DNA, 80 bp, synthetic construct
  source 1..80: mol_type = other DNA
cctgtaaccccagcactttgggaggccaaggaggcaggatcgcttgaggtcagaagttcgaaagcagcctgggcaacata

SEQ ID NO: 107403 - DNA, 80 bp, synthetic construct; identical to SEQ ID NO: 20860
  source 1..80: mol_type = other DNA

SEQ ID NO: 107404 - DNA, 80 bp, synthetic construct
  source 1..80: mol_type = other DNA
ctcattggctgaggggctctcgcttgtggtgtctcccgacagcatccacagtgtggctccggagaatgaaggaaggctgg

SEQ ID NO: 107405 - DNA, 80 bp, synthetic construct
  source 1..80: mol_type = other DNA
ctttaccactcagcagctgtgtggacttgtctatcctgagtctcagtgtcttcgtgtataaaatggggacggtaatggtt

SEQ ID NO: 107406 - DNA, 80 bp, synthetic construct
  source 1..80: mol_type = other DNA
cctgttatttgaacaccctgtacgctgttggcaccatgccattgggccatgcagcccaggcctgtactgtgagggtcaca

SEQ ID NO: 107407 - DNA, 80 bp, synthetic construct; identical to SEQ ID NO: 20861
  source 1..80: mol_type = other DNA

SEQ ID NO: 107408 - DNA, 80 bp, synthetic construct
  source 1..80: mol_type = other DNA
atcttcctatcagaaaagtgtgaaatgatccccaaattaatagccagtgatttggaagtggcaaaaatccagtgaagagt

SEQ ID NO: 107409 - DNA, 80 bp, synthetic construct
  source 1..80: mol_type = other DNA
tcagctgtgttggtcccatctttgctctacttacagcttatcgtttctgacaggagtcccagggcaggttctcattgatc

SEQ ID NO: 107410 - DNA, 80 bp, synthetic construct; identical to SEQ ID NO: 20862
  source 1..80: mol_type = other DNA

SEQ ID NO: 107411 - DNA, 80 bp, synthetic construct
  source 1..80: mol_type = other DNA
aacccccgtggctgctttgctttccctgcagggagtacaccgaggatgggcaggtgaagaaggagacgaggtattcctac

SEQ ID NO: 107412 - DNA, 80 bp, synthetic construct
  source 1..80: mol_type = other DNA
gaggctccctgacccacccctttggctgtgagataggaggagctgggctggtgggtctcagccgcgtgccactcctaccc

SEQ ID NO: 107413 - DNA, 80 bp, synthetic construct
  source 1..80: mol_type = other DNA
cagtttcttcatctgaataacaggattgagttaatcctgcctcgtgggttgaaaatgtgggacatgggtttgagaccaag

SEQ ID NO: 107414 - DNA, 80 bp, synthetic construct; identical to SEQ ID NO: 20863
  source 1..80: mol_type = other DNA

SEQ ID NO: 107415 - DNA, 80 bp, synthetic construct
  source 1..80: mol_type = other DNA
ccagtaagatggttgggatggaatgctctgggaggggctagtgaggggtgtaaagtccatgcaagatacatctgacagca

SEQ ID NO: 107416 - DNA, 80 bp, synthetic construct
  source 1..80: mol_type = other DNA
atctggacttgcaggaacccccgggtggggaccctgcccagcacaaacaacccaaagggacccgggcagctcccacaccg

SEQ ID NO: 107417 - DNA, 80 bp, synthetic construct
  source 1..80: mol_type = other DNA
gcccccctagggccggagctcccagtactcagccttcagagggctaaaggcacaggatcagtctgcacctttcccagcac

SEQ ID NO: 107418 - DNA, 80 bp, synthetic construct; identical to SEQ ID NO: 20864
  source 1..80: mol_type = other DNA

SEQ ID NO: 107419 - DNA, 80 bp, synthetic construct
  source 1..80: mol_type = other DNA
ctgacccatgaaggtgggagaggataccaagggcccagatagtcctggggaggctggatgatcctgggcctggcctggcc

SEQ ID NO: 107420 - DNA, 80 bp, synthetic construct
  source 1..80: mol_type = other DNA
tggtcactctgacttggtgggagagggcacagggaaagcttcctggaggagatggtctaacccaggggaagccgtggacg

SEQ ID NO: 107421 - DNA, 80 bp, synthetic construct
  source 1..80: mol_type = other DNA
atcgacaaagtcgacaacttcaagtccctgagcctatccaagctggaggaccctcatgtggacatcattcgccgtggaga

SEQ ID NO: 107422 - DNA, 80 bp, synthetic construct
  source 1..80: mol_type = other DNA
gctgagtgggagaggccctctgggtgacggcacagcctgggcacgggtgtggaggtgggagaagagcctgaggggcgtag

SEQ ID NO: 107423 - DNA, 80 bp, synthetic construct; identical to SEQ ID NO: 20865
  source 1..80: mol_type = other DNA

SEQ ID NO: 107424 - DNA, 80 bp, synthetic construct
  source 1..80: mol_type = other DNA
tctcatagtcgcaccttatgacaggtgttccagtcacacacagaccctctccccaagcccgttttgatctgtcaataatt

SEQ ID NO: 107425 - DNA, 80 bp, synthetic construct
  source 1..80: mol_type = other DNA
tctgtgctcacttccccagccggcacccagtcccgggagggtgggccatggctctcgtgggcgtgtctcccgctggtcac

SEQ ID NO: 107426 - DNA, 80 bp, synthetic construct
  source 1..80: mol_type = other DNA
tggaggaacaagcatgtccttccttccttccagtggttatttaataagatcacactaccaggggtcatagccagtgaatg

SEQ ID NO: 107427 - DNA, 80 bp, synthetic construct; identical to SEQ ID NO: 20866
  source 1..80: mol_type = other DNA

SEQ ID NO: 107428 - DNA, 80 bp, synthetic construct
  source 1..80: mol_type = other DNA
ggagtgagagtgacagaaactcgtaagtactgatgcatcgtgccgagtgttggaaagaggagaacaggtgctctgatacc

SEQ ID NO: 107429 - DNA, 80 bp, synthetic construct
  source 1..80: mol_type = other DNA
accttctaagggggcacccggagtgctgtggccacagcccagagcggggagagggagtgggtgggggggctccaccaaag

SEQ ID NO: 107430 - DNA, 80 bp, synthetic construct
  source 1..80: mol_type = other DNA
gtgccttaaaagttagcctgtcttctctaggcaggcaatccttctctgcagcagaagaattgagtctttagtttttctgt

SEQ ID NO: 107431 - DNA, 80 bp, synthetic construct; identical to SEQ ID NO: 20867
  source 1..80: mol_type = other DNA

SEQ ID NO: 107432 - DNA, 80 bp, synthetic construct
  source 1..80: mol_type = other DNA
aggaggcccagtccaggccttgctctctctcccagggctgaggcccagctcacgcagccgcccctccagagaggagtgga

SEQ ID NO: 107433 - DNA, 80 bp, synthetic construct
  source 1..80: mol_type = other DNA
gggtctctgccaagtagaaaaaaggcccagagccaggcaggcagctcagggcaaaagtcaggatgccccgattccagtcc

SEQ ID NO: 107434 - DNA, 80 bp, synthetic construct
  source 1..80: mol_type = other DNA
tccctaactggtttggtcattgaggattattcattcattcagcaagttttcattgaacaccaggtacttcacagacatgc

SEQ ID NO: 107435 - DNA, 80 bp, synthetic construct; identical to SEQ ID NO: 20868
  source 1..80: mol_type = other DNA

SEQ ID NO: 107436 - DNA, 80 bp, synthetic construct
  source 1..80: mol_type = other DNA
ggacagcagccagcagggtcagggcactggcagcagggtcggtgtccggggggtgtggcagggctctggcaggtgactgt

SEQ ID NO: 107437 - DNA, 80 bp, synthetic construct
  source 1..80: mol_type = other DNA
atgtgctgagatggagaaggcgccagtgtcagcactagacaggctgagatgtcaagtggaaatgtcaaggaggtggtgga

SEQ ID NO: 107438 - DNA, 80 bp, synthetic construct
  source 1..80: mol_type = other DNA
cgacagcgatggagcctgagaaggagggtgcagtgtccccaagccatgtggagaggttctgagattaaacagatcacaca

SEQ ID NO: 107439 - DNA, 80 bp, synthetic construct; identical to SEQ ID NO: 20869
  source 1..80: mol_type = other DNA

SEQ ID NO: 107440 - DNA, 80 bp, synthetic construct
  source 1..80: mol_type = other DNA
ggcctgcgggcagctggctggatggccatgttcatgggcctcaaccttatgacacggatcctctacaccttgggtaggtg

SEQ ID NO: 107441 - DNA, 80 bp, synthetic construct
  source 1..80: mol_type = other DNA
tgagggagcagaggaaggcaggcttgagggcaggagctgccaggggccaggctgggtggggccaactctggggcactggt

SEQ ID NO: 107442 - DNA, 80 bp, synthetic construct
  source 1..80: mol_type = other DNA
atctcagcttcagtcacctcaccccttacatgcagagttttatgaaatgtggcaaataggaaacacccaaaactctcatg

SEQ ID NO: 107443 - DNA, 80 bp, synthetic construct
  source 1..80: mol_type = other DNA
gatctgagtgcccagggtgactaagtgcgttctgggcccaggaggatggggttcctcggaggactctccatccaagcctt

SEQ ID NO: 107444 - DNA, 80 bp, synthetic construct; identical to SEQ ID NO: 20870
  source 1..80: mol_type = other DNA

SEQ ID NO: 107445 - DNA, 80 bp, synthetic construct
  source 1..80: mol_type = other DNA
ttctttggatctctgatgtctgtgatcccaattcactctacgtctggaatgcgccagactcaggacagacttagagtgtg

SEQ ID NO: 107446 - DNA, 80 bp, synthetic construct
  source 1..80: mol_type = other DNA
ccatacggtcttgagttcaaatcctggttctggcactttctaacaggaggactggtggtgagtttcttaattccctgagt

SEQ ID NO: 107447 - DNA, 80 bp, synthetic construct
  source 1..80: mol_type = other DNA
aaacatgaactttgcttattataagggctgagtagcagtgctgtatgggaacagatcaggatgaggccaggtagtggctt

SEQ ID NO: 107448 - DNA, 80 bp, synthetic construct; identical to SEQ ID NO: 20871
  source 1..80: mol_type = other DNA

SEQ ID NO: 107449 - DNA, 80 bp, synthetic construct
  source 1..80: mol_type = other DNA
tgtgcaggacccaggttatttctagcattacaggcaaatgtctttatactggcctcagactactctccacataaagtatt

SEQ ID NO: 107450 - DNA, 80 bp, synthetic construct
  source 1..80: mol_type = other DNA
tctcccctcctcatgcatgtagcaacatgggcccatcctcatctagggacaggagagatctgctgagctggtgaggtgta

SEQ ID NO: 107451 - DNA, 80 bp, synthetic construct
  source 1..80: mol_type = other DNA
ccgacccctgtgggccctcctcattgccggcctggcccttgtgcccatccttgttgctcggacacgggtgccagccaaaa

SEQ ID NO: 107452 - DNA, 80 bp, synthetic construct; identical to SEQ ID NO: 20872
  source 1..80: mol_type = other DNA

SEQ ID NO: 107453 - DNA, 80 bp, synthetic construct
  source 1..80: mol_type = other DNA
ttgccgtgtgctgcttctcatcactgcacacaagtgccatgctttgccaccaccaccaagcacatctgtgatcctgaagg

SEQ ID NO: 107454 - DNA, 80 bp, synthetic construct
  source 1..80: mol_type = other DNA
cactgaagatgtcctgaggagaaaagctggacatatactgggcttcacacttatcttatggcttggcagaatctttgtag

SEQ ID NO: 107455 - DNA, 80 bp, synthetic construct
  source 1..80: mol_type = other DNA
accctttagtctgtcagttgaattcagagcactgaaaggtgttaaattggggtatgtggtttgattgataaaaagttacc

SEQ ID NO: 107456 - DNA, 80 bp, synthetic construct; identical to SEQ ID NO: 20873
  source 1..80: mol_type = other DNA

SEQ ID NO: 107457 - DNA, 80 bp, synthetic construct
  source 1..80: mol_type = other DNA
tccacccacacctaagtcacagaatttctaagttccccaactactctcacacccttttaaagataaagtatgttgtaacc

SEQ ID NO: 107458 - DNA, 80 bp, synthetic construct
  source 1..80: mol_type = other DNA
gtgcctgtgctataaatgagtttcttcacatgaaaaacacagccagcccaagatgacttatctgggtttaggattcaata

SEQ ID NO: 107459 - DNA, 80 bp, synthetic construct; identical to SEQ ID NO: 20874
  source 1..80: mol_type = other DNA

SEQ ID NO: 107460 - DNA, 80 bp, synthetic construct
  source 1..80: mol_type = other DNA
aggctttatttgcatcccccaggacagatctggggagggagtcgggggatttggggttgaggacatggccaggctcaggt

SEQ ID NO: 107461 - DNA, 80 bp, synthetic construct
  source 1..80: mol_type = other DNA
cacccgcttaccatcatagtcgatgcggccgtcgttgttcttgtctccgtccttcatgagctcctcgatgtcgtcctccg

SEQ ID NO: 107462 - DNA, 80 bp, synthetic construct; identical to SEQ ID NO: 20875
  source 1..80: mol_type = other DNA

SEQ ID NO: 107463 - DNA, 80 bp, synthetic construct
  source 1..80: mol_type = other DNA
acacgaacccccatgttctcaccgcatcctcacaccaaacgccaggcttgtgtagcccttatgcccattttatagatgag

SEQ ID NO: 107464 - DNA, 80 bp, synthetic construct
  source 1..80: mol_type = other DNA
ccttggtgctgatgcagccatcctcagcgcccagcacgaagatgtcgaaggctgccttgaactctgtgttcaggggttgg

SEQ ID NO: 107465 - DNA, 80 bp, synthetic construct; identical to SEQ ID NO: 20876
  source 1..80: mol_type = other DNA

SEQ ID NO: 107466 - DNA, 80 bp, synthetic construct
  source 1..80: mol_type = other DNA
acccccttcaggaccaaggtgaccctcagtaacaatagtcagtgaccactcaatgccctttcggcccctgatgaaactca

SEQ ID NO: 107467 - DNA, 80 bp, synthetic construct
  source 1..80: mol_type = other DNA
acctgaccagggtggccactgggctatttttaacgaggaacaaagttaaacctggtgattgttctggggactttggcatg

SEQ ID NO: 107468 - DNA, 80 bp, synthetic construct; identical to SEQ ID NO: 20877
  source 1..80: mol_type = other DNA

SEQ ID NO: 107469 - DNA, 80 bp, synthetic construct
  source 1..80: mol_type = other DNA
ggttctccctcatgtccagaacttccctgcctcaaacttcaaagccccatctccagcccaggactcaggctctacagacc

SEQ ID NO: 107470 - DNA, 80 bp, synthetic construct
  source 1..80: mol_type = other DNA
agacaaatgcagagacatgtggctgagcgacagtgccacagaccacagacacttggaaacagagagtgagacacgatgct

SEQ ID NO: 107471 - DNA, 80 bp, synthetic construct; identical to SEQ ID NO: 20878
  source 1..80: mol_type = other DNA

SEQ ID NO: 107472 - DNA, 80 bp, synthetic construct
  source 1..80: mol_type = other DNA
tttcagctcagagagaagctttattcctcagggccctcctcagggcaggggcagtaggcaggaaggctcagctctcaaac

SEQ ID NO: 107473 - DNA, 80 bp, synthetic construct
  source 1..80: mol_type = other DNA
actctaccctggatgcctaagtatctagttctggagcacttcctgtcttttcaagataatccctgccaattttccccatg

SEQ ID NO: 107474 - DNA, 80 bp, synthetic construct
  source 1..80: mol_type = other DNA
gcacttcctatctttcccctccacttcctgtctgccttatgcccttcctgtctccttccttctcttcttattatagtagt

SEQ ID NO: 107475 - DNA, 80 bp, synthetic construct
  source 1..80: mol_type = other DNA
ccacctcacctcatctcagcacataggcactgtcattttacatcacaaggaaaagaagggtgattacagtgctataagat

SEQ ID NO: 107476 - DNA, 80 bp, synthetic construct
  source 1..80: mol_type = other DNA
gccatcctctcacctcagactcctgaggagctgggaccacaggtgtgtgccaccatgcccagctaacttttgttctgttt

SEQ ID NO: 107477 - DNA, 80 bp, synthetic construct
  source 1..80: mol_type = other DNA
tgtttgtatttttactacaggtggggtttcactgtgttggccaggctggtctcaaactcctgacctcatgatccgcccgc

SEQ ID NO: 107478 - DNA, 80 bp, synthetic construct; identical to SEQ ID NO: 20879
  source 1..80: mol_type = other DNA

SEQ ID NO: 107479 - DNA, 80 bp, synthetic construct
  source 1..80: mol_type = other DNA
tcactgcaccctcgatctcatgggctcaagcgattttcctgcctcagcctcctgagaagctgcatgccaccaccgtgact

SEQ ID NO: 107480 - DNA, 80 bp, synthetic construct
  source 1..80: mol_type = other DNA
gatggtgtcattgcactccagcctgggcagcagagactccatcgcaaaaaaaaaaaaaaaaggaaattaaaaaaaaattt

SEQ ID NO: 107481 - DNA, 80 bp, synthetic construct
  source 1..80: mol_type = other DNA
tctacctccaactccaagcaccatctgccctcaggcctagggttgttggcacccacagcccttcccctcagcatcctctt

SEQ ID NO: 107482 - DNA, 80 bp, synthetic construct; identical to SEQ ID NO: 20880
  source 1..80: mol_type = other DNA

SEQ ID NO: 107483 - DNA, 80 bp, synthetic construct
  source 1..80: mol_type = other DNA
caaaaccactggcataacctggtccagctacatgcaaatcacaattccctggccagtgcctgagctaatttaccaacatg

SEQ ID NO: 107484 - DNA, 80 bp, synthetic construct; identical to SEQ ID NO: 20881
  source 1..80: mol_type = other DNA

SEQ ID NO: 107485 - DNA, 80 bp, synthetic construct
  source 1..80: mol_type = other DNA
ctcctgggtctgagggagaaggggctcggggcctggactcctgggtctgagggaggagaaggggctgggggcctggactc

SEQ ID NO: 107486 - DNA, 80 bp, synthetic construct
  source 1..80: mol_type = other DNA
aggaggggctggggactggactcctgggtctgagggaggaggggctggggcctggacttcagggtctgagggaggagggg

SEQ ID NO: 107487 - DNA, 80 bp, synthetic construct
  source 1..80: mol_type = other DNA
agggtctgagggaggagaggctggggcctggactccagggtctcagggaggagaggctggggcctggactccagggtctg

SEQ ID NO: 107488 - DNA, 80 bp, synthetic construct; identical to SEQ ID NO: 20882
  source 1..80: mol_type = other DNA

SEQ ID NO: 107489 - DNA, 80 bp, synthetic construct
  source 1..80: mol_type = other DNA
ggaggaggggctggggcctggacttcagggtctcagggaggaggggctggggactggactcctgggtctgagggaggagg

SEQ ID NO: 107490 - DNA, 80 bp, synthetic construct; identical to SEQ ID NO: 20883
  source 1..80: mol_type = other DNA

SEQ ID NO: 107491 - DNA, 80 bp, synthetic construct
  source 1..80: mol_type = other DNA
cagagtctgcagaggggtgggagggaagcgcagcccacccggggcttcaggataaagaccaggcgtggggaaccgcctct

SEQ ID NO: 107492 - DNA, 80 bp, synthetic construct
  source 1..80: mol_type = other DNA
acctgcctgctctttcccagtcccgcccgtcctcaccttcagctgcaattttctcgaggcggagatcttagattttttct

SEQ ID NO: 107493 - DNA, 80 bp, synthetic construct; identical to SEQ ID NO: 20884
  source 1..80: mol_type = other DNA

SEQ ID NO: 107494 - DNA, 80 bp, synthetic construct
  source 1..80: mol_type = other DNA
agccccgtcccaccttggcgtgcggctccgtggcataagcgcggtagttggaggagcggcgtctgattggggctggtgca

SEQ ID NO: 107495 - DNA, 80 bp, synthetic construct
  source 1..80: mol_type = other DNA
cttagcccgctgctctcaccgcatcgctgctcctggaaggagagaaaccaaggaggggggttagtggtgggctgtgtcct

SEQ ID NO: 107496 - DNA, 80 bp, synthetic construct
  source 1..80: mol_type = other DNA
acccacttcctctcttcacccaagagtccctacgcctacctcgcaggccaagggtccagcctctcagctgcgacccctct

SEQ ID NO: 107497 - DNA, 80 bp, synthetic construct; identical to SEQ ID NO: 20885
  source 1..80: mol_type = other DNA

SEQ ID NO: 107498 - DNA, 80 bp, synthetic construct
  source 1..80: mol_type = other DNA
cgggaactgggggagtgcaggccggaggcaggtgcgagcgaggagcagatctttggtgaaggaggccaggctctatttcc

SEQ ID NO: 107499 - DNA, 80 bp, synthetic construct
  source 1..80: mol_type = other DNA
gaataggacagcagcctgaggctggagggaagcttctccgccccacatttcacccccaccagcaagcagaggccacaggg

SEQ ID NO: 107500 - DNA, 80 bp, synthetic construct; identical to SEQ ID NO: 20886
  source 1..80: mol_type = other DNA

SEQ ID NO: 107501 - DNA, 80 bp, synthetic construct
  source 1..80: mol_type = other DNA
gcttccaggatgcctcatgggcctcccactgtggggtcccagggccataataggttcaggatatgagagtcccataagaa

SEQ ID NO: 107502 - DNA, 80 bp, synthetic construct
  source 1..80: mol_type = other DNA
ctgccccaaagtttggcaaatctgtgtcctgttggccggtgcagagttcagtgtggaaccaaaaaaagagaaaaaagtgg

SEQ ID NO: 107503 - DNA, 80 bp, synthetic construct
  source 1..80: mol_type = other DNA
tgcttggaacagtggttggaacactatagcaataataacaattagtattatctctgtaaccctcacaatcaccctctgaa

SEQ ID NO: 107504 - DNA, 80 bp, synthetic construct
  source 1..80: mol_type = other DNA
tgggaggtgggagtaccctgtagccactgcagcctgagcctgcccagcgaggggcttcttgcccagggaggagtggtttg

SEQ ID NO: 107505 - DNA, 80 bp, synthetic construct; identical to SEQ ID NO: 20887
  source 1..80: mol_type = other DNA

SEQ ID NO: 107506 - DNA, 80 bp, synthetic construct
  source 1..80: mol_type = other DNA
caccaggaaagtgtctctgctcagccccagcgagctctcagacacttccagcaagcagtcgtcaatgcggtggacatgga

SEQ ID NO: 107507 - DNA, 80 bp, synthetic construct
  source 1..80: mol_type = other DNA
cctcatatttctgctgcttgaacttctcctgcaggtcgaacttctctgcctccaagttatagatgctctgccacagctcc

SEQ ID NO: 107508 - DNA, 80 bp, synthetic construct
  source 1..80: mol_type = other DNA
cctgggcctgacccagcctggggaccagacggcagcacccagtgctcaggaacggacaccagggactgccagggcaaagt

SEQ ID NO: 107509 - DNA, 80 bp, synthetic construct; identical to SEQ ID NO: 20888
  source 1..80: mol_type = other DNA

SEQ ID NO: 107510 - DNA, 80 bp, synthetic construct
  source 1..80: mol_type = other DNA
gaatcttcttcttcttttcccgctcagtctgcctcttcccacttttccgctctgtctggagggtgtgggaagcagagtaa

SEQ ID NO: 107511 - DNA, 80 bp, synthetic construct
  source 1..80: mol_type = other DNA
aaactgaggtaggggcaagaaggatcacgtcagtctcttccttctttgcctaactaatctctttcacctctcaccagctt

SEQ ID NO: 107512 - DNA, 80 bp, synthetic construct
  source 1..80: mol_type = other DNA
gaaaaagaccaagacggcaacagagacacagagagaaggcaggaagacaaaggcaaggagagacatggaagagaagattc

SEQ ID NO: 107513 - DNA, 80 bp, synthetic construct; identical to SEQ ID NO: 20889
  source 1..80: mol_type = other DNA

SEQ ID NO: 107514 - DNA, 80 bp, synthetic construct
  source 1..80: mol_type = other DNA
aagcatcaaggcaggcaatatgagtgccagttgaggaaaccgaggctcagaggttgcaaaaggtcacacaactgtatgtg

SEQ ID NO: 107515 - DNA, 80 bp, synthetic construct
  source 1..80: mol_type = other DNA
cctagtgcaagccgcggtcaggctgaaaaccagctcagggctgggcatgaggagacctcagtcttccacccacagcagct

SEQ ID NO: 107516 - DNA, 80 bp, synthetic construct
  source 1..80: mol_type = other DNA
cttcttcttccgggcctcatcctcagccttcctcctgttctcctcctcctctcgtcgagccctctcttcctgatttacag

SEQ ID NO: 107517 - DNA, 80 bp, synthetic construct; identical to SEQ ID NO: 20890
  source 1..80: mol_type = other DNA

SEQ ID NO: 107518 - DNA, 80 bp, synthetic construct
  source 1..80: mol_type = other DNA
ggcatttctgtcttgtttgctgatgtattatcagagccaagacaatgcccagcacttcctaggttgatattgatattgtc

SEQ ID NO: 107519 - DNA, 80 bp, synthetic construct
  source 1..80: mol_type = other DNA
caccacgcctggctaattttgtatttttagtagagacagggtttctccgttggtcaggatggtctcgaactcccaacctc

SEQ ID NO: 107520 - DNA, 80 bp, synthetic construct
  source 1..80: mol_type = other DNA
ctccatgggcctgggctaggggtcactcacagccaggcggttctgccgctccttctcccgctcattccggatgcgctgct

SEQ ID NO: 107521 - DNA, 80 bp, synthetic construct; identical to SEQ ID NO: 20891
  source 1..80: mol_type = other DNA

SEQ ID NO: 107522 - DNA, 80 bp, synthetic construct
  source 1..80: mol_type = other DNA
tgtctgtgggaaggcaagtttgatggggagaaacaaaagcaatcaaagcagcctccacgctctgcaggagaaggatgtgg

SEQ ID NO: 107523 - DNA, 80 bp, synthetic construct
  source 1..80: mol_type = other DNA
tcaaggagcatccagtaggatggggagggaaggcagggacccgagaaaccagtcagggctgcaggagctgtgcagaatgc

SEQ ID NO: 107524 - DNA, 80 bp, synthetic construct; identical to SEQ ID NO: 20892
  source 1..80: mol_type = other DNA

SEQ ID NO: 107525 - DNA, 80 bp, synthetic construct
  source 1..80: mol_type = other DNA
taactgtggcctgaacccaggaccacgctcatggatgggcacccagcctggctggtgctgcaccccatcccacctatgct

SEQ ID NO: 107526 - DNA, 80 bp, synthetic construct
  source 1..80: mol_type = other DNA
agagaggaatagtcagcatcagccccattctggacccagggactgagggtgtccaggacaggcagggccctgatccttcc

SEQ ID NO: 107527 - DNA, 80 bp, synthetic construct
  source 1..80: mol_type = other DNA
ccgttaatctcacttaggagaactgaggctcagggaggtagaatgacttgctcaaagccacacaacttggaatcaaagaa

SEQ ID NO: 107528 - DNA, 80 bp, synthetic construct; identical to SEQ ID NO: 20893
  source 1..80: mol_type = other DNA

SEQ ID NO: 107529 - DNA, 80 bp, synthetic construct
  source 1..80: mol_type = other DNA
cacgtgtgtggcaccaagccgtcctgccctctctcagctctctgaagccgccatgcctatgctggcacggtttcattgtt

SEQ ID NO: 107530 - DNA, 80 bp, synthetic construct
  source 1..80: mol_type = other DNA
gtgatggagtgttgggtggaattcagccctcactcactcccttaggaagagacgcttgtgcagtacacaacttgtacaac

SEQ ID NO: 107531 - DNA, 80 bp, synthetic construct
  source 1..80: mol_type = other DNA
ccatctggaggagatagaagcacacagccatgggtcagggggccccagaagtggtcccaactccgccctcgatgagctag

SEQ ID NO: 107532 - DNA, 80 bp, synthetic construct; identical to SEQ ID NO: 20894
  source 1..80: mol_type = other DNA

SEQ ID NO: 107533 - DNA, 80 bp, synthetic construct
  source 1..80: mol_type = other DNA
agtgactgggaccacttagaaccctggtgaaggctgcagcatgacgatgactgcagcaatgacccaccatgaccatctat

SEQ ID NO: 107534 - DNA, 80 bp, synthetic construct
  source 1..80: mol_type = other DNA
aatgcaacttctctgggagaaggggcaaagttgaaagctcaacatctaaaactttggaagtgccaccaagttctgtcctc

SEQ ID NO: 107535 - DNA, 80 bp, synthetic construct
  source 1..80: mol_type = other DNA
taccttcagcctcctttgcttcctcttcttcttcatcttctaaatgaaacacgagaaatcaatcaaggtccttgttctga

SEQ ID NO: 107536 - DNA, 80 bp, synthetic construct; identical to SEQ ID NO: 20895
  source 1..80: mol_type = other DNA

SEQ ID NO: 107537 - DNA, 80 bp, synthetic construct
  source 1..80: mol_type = other DNA
ctggagaagtgaagcagacagagtgaagaagcaggccccactcatgctatcaggcagaacccagagcagagaatgggcag

SEQ ID NO: 107538 - DNA, 80 bp, synthetic construct
  source 1..80: mol_type = other DNA
gggactccacctcattccccaactttccagcccagaagttccaccccgtgtctggcaccacagaacatgctctgcttaag

SEQ ID NO: 107539 - DNA, 80 bp, synthetic construct
  source 1..80: mol_type = other DNA
tctattttcatctatttgtttggcaggatgtggcccccatctcactcaggcacttggtgtagacagacagacaaacagat

SEQ ID NO: 107540 - DNA, 80 bp, synthetic construct; identical to SEQ ID NO: 20896
  source 1..80: mol_type = other DNA

SEQ ID NO: 107541 - DNA, 80 bp, synthetic construct
  source 1..80: mol_type = other DNA
ctccccaacccacctactgcatcttgagatatagctgtcagaacgcactttctaaaattaagccctggtctcactccctt

SEQ ID NO: 107542 - DNA, 80 bp, synthetic construct
  source 1..80: mol_type = other DNA
aacactggggtgtgcgcgggggcagggtggcgctgctgtcttccaggtgccaggtcccctctatggccacatttggagca

SEQ ID NO: 107543 - DNA, 80 bp, synthetic construct; identical to SEQ ID NO: 20897
  source 1..80: mol_type = other DNA

SEQ ID NO: 107544 - DNA, 80 bp, synthetic construct
  source 1..80: mol_type = other DNA
agtggttttaagagtgtgggctttggagttaggccggcattccaattcccaagccactactttccagcaacaggggcaac

SEQ ID NO: 107545 - DNA, 80 bp, synthetic construct; identical to SEQ ID NO: 20898
  source 1..80: mol_type = other DNA

SEQ ID NO: 107546 - DNA, 80 bp, synthetic construct
  source 1..80: mol_type = other DNA
ctgccccatctaagaagggtccagcattataaatctaaggaaagaggctgcatctacaacagttgttctacgtacaaata

SEQ ID NO: 107547 - DNA, 80 bp, synthetic construct
  source 1..80: mol_type = other DNA
gcaagtctcgtctattcatggcaagcaaggcagatgctacacggctcaggccccagcacagtggagaatgactctgctaa

SEQ ID NO: 107548 - DNA, 80 bp, synthetic construct
  source 1..80: mol_type = other DNA
gaacacagcagaatttggagccagttagattttttattcaaaaatatatttctgatagcttctgaagtatctggtgttcc

SEQ ID NO: 107549 - DNA, 80 bp, synthetic construct
  source 1..80: mol_type = other DNA
tccccccttggaccttcatagagacccttctcctaatatctacatgccacatgctgaagtgatacctgagccactaaaag

SEQ ID NO: 107550 - DNA, 80 bp, synthetic construct; identical to SEQ ID NO: 20899
  source 1..80: mol_type = other DNA

SEQ ID NO: 107551 - DNA, 80 bp, synthetic construct
  source 1..80: mol_type = other DNA
tccaaaataactggtggaaggtggagtatagaggaaagaagactggccctaagatgatgattgttgaagctggtaatggg

SEQ ID NO: 107552 - DNA, 80 bp, synthetic construct
  source 1..80: mol_type = other DNA
acaggtttaaatcgtttgcctcaagacccgagcaacccaggtaggactgattcccattttagaaggcactgttgttggag

SEQ ID NO: 107553 - DNA, 80 bp, synthetic construct; identical to SEQ ID NO: 20900
  source 1..80: mol_type = other DNA

SEQ ID NO: 107554 - DNA, 80 bp, synthetic construct
  source 1..80: mol_type = other DNA
cttactctttccatctttgcccaagctgtacccctttctagaaagtcctgccctctcccaaatctcttatctttccaaat

SEQ ID NO: 107555 - DNA, 80 bp, synthetic construct
  source 1..80: mol_type = other DNA
ctaatttcttctcccagtttatgtcttaacatctcaacaagagtaagttctgtgagggcagtagccgtgcctatacctct

SEQ ID NO: 107556 - DNA, 80 bp, synthetic construct
  source 1..80: mol_type = other DNA
gcataatcagctctgtgcctctggagagtcactgaaccttcctcagtcagtttcaggagacccaacatctcagcttctct

SEQ ID NO: 107557 - DNA, 80 bp, synthetic construct; identical to SEQ ID NO: 20901
  source 1..80: mol_type = other DNA

SEQ ID NO: 107558 - DNA, 80 bp, synthetic construct
  source 1..80: mol_type = other DNA
cctccaaaaggagaaaaaagtcagtgcaggtacaaagggaagcctgccttcctcagaagagctctggcccccgttgtaca

SEQ ID NO: 107559 - DNA, 80 bp, synthetic construct
  source 1..80: mol_type = other DNA
ctgaacaggcaatactgcctgggatgctgcatttccatttgtgacactcaagacaatgtctgcagtttctcaacctttcc

SEQ ID NO: 107560 - DNA, 80 bp, synthetic construct
  source 1..80: mol_type = other DNA
catgcccgactaatttttgtatttttagtaaagctgggattttgccacattgcccaggctgtttcgaactcccaggctca

SEQ ID NO: 107561 - DNA, 80 bp, synthetic construct
  source 1..80: mol_type = other DNA
tctctaaataaataaatcaaagcacacagcggggatccttgtggtttgggatcttttcagtatgtagactgtggtgatgg

SEQ ID NO: 107562 - DNA, 80 bp, synthetic construct; identical to SEQ ID NO: 20902
  source 1..80: mol_type = other DNA

SEQ ID NO: 107563 - DNA, 80 bp, synthetic construct
  source 1..80: mol_type = other DNA
tcctttctctgtctcatggagataaagtgtacacatcctggctactcagggtctttacgaggctccagttgacattaaca

SEQ ID NO: 107564 - DNA, 80 bp, synthetic construct
  source 1..80: mol_type = other DNA
atctcagctctctttgctgtgaaattactgctcttcttgggtaggtgtgaggaacagaggtagtgtgaagtgtaggcatt

SEQ ID NO: 107565 - DNA, 80 bp, synthetic construct; identical to SEQ ID NO: 20903
  source 1..80: mol_type = other DNA

SEQ ID NO: 107566 - DNA, 80 bp, synthetic construct
  source 1..80: mol_type = other DNA
gaggcacatagacagtcctgctcactccctcatcacctctccctgcacatcccccccatagtggctgagaccaatcccag

SEQ ID NO: 107567 - DNA, 80 bp, synthetic construct
  source 1..80: mol_type = other DNA
tgattgtcttcagaccctgttcccattatgtccagttctgctgggttagaaacaagcatggctgcagcagagtggtcctt

SEQ ID NO: 107568 - DNA, 80 bp, synthetic construct
  source 1..80: mol_type = other DNA
tgctataatgcgggatcaagcctcattctgctgaaaaaaagactcaaaccccagaggttctccaaataggtcttaggatg

SEQ ID NO: 107569 - DNA, 80 bp, synthetic construct; identical to SEQ ID NO: 20904
  source 1..80: mol_type = other DNA

SEQ ID NO: 107570 - DNA, 80 bp, synthetic construct
  source 1..80: mol_type = other DNA
accaccatgccagtggctcaaaggcaggacctgatgcaggggaaagaggtgggctgagactgggggctgcagaatgggag

SEQ ID NO: 107571 - DNA, 80 bp, synthetic construct
  source 1..80: mol_type = other DNA
cctttcttggggagtaaagcaaagacaatagaaggcataaggcatactgaccttggggtcaaaaaatctgggcttaaaac

SEQ ID NO: 107572 - DNA, 80 bp, synthetic construct
  source 1..80: mol_type = other DNA
ttatttaagtcacctagcctctctgacttcagttaaccaactacaaagcaggagagccttgagttctgtccctgtagaaa

SEQ ID NO: 107573 - DNA, 80 bp, synthetic construct; identical to SEQ ID NO: 20905
  source 1..80: mol_type = other DNA

SEQ ID NO: 107574 - DNA, 80 bp, synthetic construct
  source 1..80: mol_type = other DNA
agcaaggcttgtcccaagatggggtgttggggtgggatgggacaagggttacacttacgggggcccaggttaaacccttt

SEQ ID NO: 107575 - DNA, 80 bp, synthetic construct
  source 1..80: mol_type = other DNA
caaatggaattcccgcgttggcctggagaggcgctgcagaggaccctgcacatctggtcgttctcagtacttccaggaca

SEQ ID NO: 107576 - DNA, 80 bp, synthetic construct
  source 1..80: mol_type = other DNA
ctgttggttagagcctcattgtatttagagcaggcagaggcctagcaaatatttagcccactctacagatgagaaaactg

SEQ ID NO: 107577 - DNA, 80 bp, synthetic construct; identical to SEQ ID NO: 20906
  source 1..80: mol_type = other DNA

SEQ ID NO: 107578 - DNA, 80 bp, synthetic construct
  source 1..80: mol_type = other DNA
actgggtgaggcagaggatggagagggctttaagcaggcatgtgggctggggcctggtgagccagccctgcggagggagg

SEQ ID NO: 107579 - DNA, 80 bp, synthetic construct
  source 1..80: mol_type = other DNA
ggcacaatctctgctcactgcaacctcctcctccctggttaagagatcctcctgcctcagcccccttagtagctgggatt

SEQ ID NO: 107580 - DNA, 80 bp, synthetic construct
  source 1..80: mol_type = other DNA
ggagtgcagtgacaggatctcggctcattgcaacctccacctcccgggttcaagcaactctcctgcctcagcctccagag

SEQ ID NO: 107581 - DNA, 80 bp, synthetic construct
  source 1..80: mol_type = other DNA
atgcctggcccaaatccagtatttatttaaacaactagtgacacttactcgttcctatacatttatgataaatttaccca

SEQ ID NO: 107582 - DNA, 80 bp, synthetic construct; identical to SEQ ID NO: 20907
  source 1..80: mol_type = other DNA

SEQ ID NO: 107583 - DNA, 80 bp, synthetic construct
  source 1..80: mol_type = other DNA
cttcgacctcccgagtagctggaattacaggcttacactaccatagctggctgatttttgtattttcagtagagacaggg

SEQ ID NO: 107584 - DNA, 80 bp, synthetic construct
  source 1..80: mol_type = other DNA
tgaatggaatgttttcttgttgtctaatttttcacagtgcttctgctggaagataaaattaatatttttctacctactac

SEQ ID NO: 107585 - DNA, 80 bp, synthetic construct; identical to SEQ ID NO: 20908
  source 1..80: mol_type = other DNA

SEQ ID NO: 107586 - DNA, 80 bp, synthetic construct
  source 1..80: mol_type = other DNA
aaatacaaaaaattagccgggggtggtggcaggcacctgtaattccaggtattcaagaggctgaggcaagagaatcgctt

SEQ ID NO: 107587 - DNA, 80 bp, synthetic construct
  source 1..80: mol_type = other DNA
attactttgtttatttattttgagatggagtcttgccctgtcacccaggctgagtgcaatggcacgatctttgcccactg

SEQ ID NO: 107588 - DNA, 80 bp, synthetic construct; identical to SEQ ID NO: 20909
  source 1..80: mol_type = other DNA

SEQ ID NO: 107589 - DNA, 80 bp, synthetic construct
  source 1..80: mol_type = other DNA
caggctggagtgcagtggcacgatctcggctcgctgcaacctccgcctttcggattcaagcaattctcctgtctcagcct

SEQ ID NO: 107590 - DNA, 80 bp, synthetic construct
  source 1..80: mol_type = other DNA
agcctccacacccggccagattatctatctatctatctatctatctatctatctatctatctatctatctatctatctat

SEQ ID NO: 107591 - DNA, 80 bp, synthetic construct; identical to SEQ ID NO: 20910
  source 1..80: mol_type = other DNA

SEQ ID NO: 107592 - DNA, 80 bp, synthetic construct
  source 1..80: mol_type = other DNA
attgtcagccaggctggtctccactcctgacctcaggtgatccacccaccttggcctccaaagtgttgggattacaggtg

SEQ ID NO: 107593 - DNA, 80 bp, synthetic construct
  source 1..80: mol_type = other DNA
tctgttgatatgatagataatttttctttctaaatttaatatattgaattatgttgatagattttctgctattaaaacca

SEQ ID NO: 107594 - DNA, 80 bp, synthetic construct; identical to SEQ ID NO: 20911
  source 1..80: mol_type = other DNA

SEQ ID NO: 107595 - DNA, 80 bp, synthetic construct
  source 1..80: mol_type = other DNA
tggggtgttgtggccaggcgcagtggctcacgcctgtaatcccagtactttaggaggccaaggctggcggatcacgaggt

SEQ ID NO: 107596 - DNA, 80 bp, synthetic construct
  source 1..80: mol_type = other DNA
tgagattgagccactgcactccagcctgagtaacagagcgagactgtgtctccaaaaaaaaaagaaaagaaaaagaaatg

SEQ ID NO: 107597 - DNA, 80 bp, synthetic construct
  source 1..80: mol_type = other DNA
catttaaggctattcaatctcctcagagtacgaattttagatttggagacctcgtgttcctaaaatgagggggaaatttt

SEQ ID NO: 107598 - DNA, 80 bp, synthetic construct
  source 1..80: mol_type = other DNA
ccaccgtgcctggccggaaatgttttctaaataaaaaaatagaacatattgatttaaggttgtgaattacaagtttagac

SEQ ID NO: 107599 - DNA, 80 bp, synthetic construct; identical to SEQ ID NO: 20912
  source 1..80: mol_type = other DNA

SEQ ID NO: 107600 - DNA, 80 bp, synthetic construct
  source 1..80: mol_type = other DNA
aagatgagattacaggcgtgcaccaccatgcccagctaattttgtatttttagtagagatggggtttcatcttgttggtc

SEQ ID NO: 107601 - DNA, 80 bp, synthetic construct
  source 1..80: mol_type = other DNA
agcacagcagaaataaaaacagagctagggacataatctaggaaaaggttgggattgaaagggtggaggatggttgtcaa

SEQ ID NO: 107602 - DNA, 80 bp, synthetic construct
  source 1..80: mol_type = other DNA
aatcatcacactgcataccttgaatgtatgcaattttgggggatcaattatgccccaataaagcctaaaataaaaaaaaa

SEQ ID NO: 107603 - DNA, 80 bp, synthetic construct; identical to SEQ ID NO: 20913
  source 1..80: mol_type = other DNA

SEQ ID NO: 107604 - DNA, 80 bp, synthetic construct
  source 1..80: mol_type = other DNA
ctggacagtagcacccactggaccctaacacccatctccaccaccagggaggaggaagggcaagccatgtctgactgccc

SEQ ID NO: 107605 - DNA, 80 bp, synthetic construct
  source 1..80: mol_type = other DNA
cccgactctcctccctatcccaagaagccctttgaaaggttttcctggcagagtttaaagcttcaattcattcagctacc

SEQ ID NO: 107606 - DNA, 80 bp, synthetic construct; identical to SEQ ID NO: 20914
  source 1..80: mol_type = other DNA

SEQ ID NO: 107607 - DNA, 80 bp, synthetic construct
  source 1..80: mol_type = other DNA
agccaccccctcccttgttgtcatgcagcccgcagactgacccagtctccagcctttgttcccctcccggaacccgggca

SEQ ID NO: 107608 - DNA, 80 bp, synthetic construct
  source 1..80: mol_type = other DNA
ggtggcagcaaagttttattgtaaaataagagatcgatataaaaatgggatataaaaagggagaaggaggggaagggtgg

SEQ ID NO: 107609 - DNA, 80 bp, synthetic construct
  source 1..80: mol_type = other DNA
caggagtttgagaccagcctgggcaacactgtgagaccccatctctacaaaacatgcaaaagttggctggccatggtggc

SEQ ID NO: 107610 - DNA, 80 bp, synthetic construct
  source 1..80: mol_type = other DNA
aaagaaattgaccctgagcataaaacaagtcttggtggatccagatcatcatatacaagagatgaaatcctccagggtgt

SEQ ID NO: 107611 - DNA, 80 bp, synthetic construct; identical to SEQ ID NO: 20915
  source 1..80: mol_type = other DNA

SEQ ID NO: 107612 - DNA, 80 bp, synthetic construct
  source 1..80: mol_type = other DNA
gaacatttcttacatctcccaaacatccctcacagtaaaaaccttaaaatctaagctggtatgtcctactccccatcctc

SEQ ID NO: 107613 - DNA, 80 bp, synthetic construct
  source 1..80: mol_type = other DNA
ctgtcagtggggaacaagaagtggagaatgtcagtctgagtcaggcccttctgtcttgaacatgagttttttatggcggg

SEQ ID NO: 107614 - DNA, 80 bp, synthetic construct; identical to SEQ ID NO: 20916
  source 1..80: mol_type = other DNA

SEQ ID NO: 107615 - DNA, 80 bp, synthetic construct
  source 1..80: mol_type = other DNA
gcctcccgagtaggtagctgggattacaggcatgcatcaccacgcccggctacttttgtatttttagtagagatggggtt

SEQ ID NO: 107616 - DNA, 80 bp, synthetic construct
  source 1..80: mol_type = other DNA
gtgcatggcagggctgagtatatgacctgaaactctggctgtattcagtattacacaattattaggcccctccttgagac

SEQ ID NO: 107617 - DNA, 80 bp, synthetic construct
  source 1..80: mol_type = other DNA
aagactaaaaaaatgtctgtgcagggctgggacccaatgagatggggtcagctgcctttgaccatgaaggcaggatgaga

SEQ ID NO: 107618 - DNA, 80 bp, synthetic construct; identical to SEQ ID NO: 20917
  source 1..80: mol_type = other DNA

SEQ ID NO: 107619 - DNA, 80 bp, synthetic construct
  source 1..80: mol_type = other DNA
ttggctgattgcaatctccgcctctggggttcaagtgattcttgtgcctcagcctcccgagtagctgggactacaggcgt

SEQ ID NO: 107620 - DNA, 80 bp, synthetic construct
  source 1..80: mol_type = other DNA
aaattttagagatgatgtcttgctatgttgttcaggctggactcaaactcttgggctcaagagatcctcctgccttagcc

SEQ ID NO: 107621 - DNA, 80 bp, synthetic construct
  source 1..80: mol_type = other DNA
gcctcccaagtagctgggattacaggcacctgccatcacgcccggttaatttttgtattttagtagagacggggtttcac

SEQ ID NO: 107622 - DNA, 80 bp, synthetic construct
  source 1..80: mol_type = other DNA
gctctgcgcccaggctgtgcctggctcgactgtgcctcctttcatgcaaccatgctgtttctcactttcagtaacaatat

SEQ ID NO: 107623 - DNA, 80 bp, synthetic construct; identical to SEQ ID NO: 20918
  source 1..80: mol_type = other DNA

SEQ ID NO: 107624 - DNA, 80 bp, synthetic construct
  source 1..80: mol_type = other DNA
aaataaaaattagccgggcgtggtggctcacacctgtaatcccagcactttgggaggccgaggcgggcggatcacatggt

SEQ ID NO: 107625 - DNA, 80 bp, synthetic construct
  source 1..80: mol_type = other DNA
gagatcatgccactgcactccagcctgggcgacagagtgagactgagtctcaaaaaaataaaataaaataaaataaaaat

SEQ ID NO: 107626 - DNA, 80 bp, synthetic construct
  source 1..80: mol_type = other DNA
tgtctcaaaaaagtaggctagagaccagcctgggcaacatagtgagactctatctatctacaaaaaattttaaaaattag

SEQ ID NO: 107627 - DNA, 80 bp, synthetic construct; identical to SEQ ID NO: 20919
  source 1..80: mol_type = other DNA

SEQ ID NO: 107628 - DNA, 80 bp, synthetic construct
  source 1..80: mol_type = other DNA
gtgggctgaggcaggagaatcgcttgaacccagaaggcggaggttgcagtgagccgagatcccgccactgcactccagcc

SEQ ID NO: 107629 - DNA, 80 bp, synthetic construct
  source 1..80: mol_type = other DNA
agtagcatctgtatcaggcaaagtcatagaaccattttcatgctctctttaacaattttctttttgaaagctggtctggt

SEQ ID NO: 107630 - DNA, 80 bp, synthetic construct
  source 1..80: mol_type = other DNA
actttccacttgataagaggtcccaagacttagtacctgaagggtgaaatattctccatccagtggtttcttctttggct

SEQ ID NO: 107631 - DNA, 80 bp, synthetic construct
  source 1..80: mol_type = other DNA
tcccctttcttgcggagattctcttcctctgtgcgccggtctctcccaggacaggcacaaacacgcacctcaaagctgtt

SEQ ID NO: 107632 - DNA, 80 bp, synthetic construct; identical to SEQ ID NO: 20920
  source 1..80: mol_type = other DNA

SEQ ID NO: 107633 - DNA, 80 bp, synthetic construct
  source 1..80: mol_type = other DNA
ccggttcatgccgcccatgcaggaactgttacacatgtagttgtagtggatggtggtacagtcagagccaacctaggaga

SEQ ID NO: 107634 - DNA, 80 bp, synthetic construct
  source 1..80: mol_type = other DNA
cgccattctccttcctcagcctcccgagtagctgggactacaggtgcccagcaccacgcccggctaatttttttttgtat

SEQ ID NO: 107635 - DNA, 80 bp, synthetic construct; identical to SEQ ID NO: 20921
  source 1..80: mol_type = other DNA

SEQ ID NO: 107636 - DNA, 80 bp, synthetic construct
  source 1..80: mol_type = other DNA
ccactcggataagatgctgaggaggggccagacctaagagcaatcagtgaggaatcagaggcctggggaccctgggcaac

SEQ ID NO: 107637 - DNA, 80 bp, synthetic construct
  source 1..80: mol_type = other DNA
gttgagggcaggggagtactgtaggaagaggaaggagacagagttgaaagtcagggcacaagtgaacagataaagcaact

SEQ ID NO: 107638 - DNA, 80 bp, synthetic construct
  source 1..80: mol_type = other DNA
tcacagctcactgcagcctccatctcctggcctcaagtgatcttcccacctcagcctcctaagtggctgggactataggt

SEQ ID NO: 107639 - DNA, 80 bp, synthetic construct; identical to SEQ ID NO: 20922
  source 1..80: mol_type = other DNA

SEQ ID NO: 107640 - DNA, 80 bp, synthetic construct
  source 1..80: mol_type = other DNA
gggatacggccaggcattgaagtctcatggaagccagcccctcagggcaactgaccgtgcaagtcacagacttggctgtc

SEQ ID NO: 107641 - DNA, 80 bp, synthetic construct
  source 1..80: mol_type = other DNA
gagcttcatctggacctgggtcttcagtgaaccattgttcaatatcgtccggggacagcatcaaatcatccattgcttgg

SEQ ID NO: 107642 - DNA, 80 bp, synthetic construct
  source 1..80: mol_type = other DNA
taccagaacgttgttttcaggaagtctgaaagacaagagcagaaagtcagtcccatggaattttcgcttcccacaggtct

SEQ ID NO: 107643 - DNA, 80 bp, synthetic construct
  source 1..80: mol_type = other DNA
gctgctgcaagaggaaaagtggggatccagcatgagacacttccaaccctgggtcacctgggcctgcagagaaggaaccc

SEQ ID NO: 107644 - DNA, 80 bp, synthetic construct; identical to SEQ ID NO: 20923
  source 1..80: mol_type = other DNA

SEQ ID NO: 107645 - DNA, 80 bp, synthetic construct
  source 1..80: mol_type = other DNA
gctaatttttgtatttttagtagagacagggctttgcatgttggccaggctggtctcgaactccttacttcaggtgatcg

SEQ ID NO: 107646 - DNA, 80 bp, synthetic construct
  source 1..80: mol_type = other DNA
catttctttgattcctttcactgcaaagcttctggaagaacaactgtctcaccgctcacctgcccattctcttcggacac

SEQ ID NO: 107647 - DNA, 80 bp, synthetic construct
  source 1..80: mol_type = other DNA
gtaggctccttcccgtgcagactttaagtcatcctattttaattcacatcacctcatttgcattctcatagcacttacat

SEQ ID NO: 107648 - DNA, 80 bp, synthetic construct; identical to SEQ ID NO: 20924
  source 1..80: mol_type = other DNA

SEQ ID NO: 107649 - DNA, 80 bp, synthetic construct
  source 1..80: mol_type = other DNA
cagtggtgcagtctaggctcactgcaacctctgccttctggtttcaagcaattctcctgcctcagcctcccgagtagctg

SEQ ID NO: 107650 - DNA, 80 bp, synthetic construct
  source 1..80: mol_type = other DNA
tggcccgccatgttctttctttctttcttttttcttttgaggcagggtcttgctttgttgcccaagctagggtacagtgg

SEQ ID NO: 107651 - DNA, 80 bp, synthetic construct
  source 1..80: mol_type = other DNA
ctagagtgcagtggtgtgatctcgactcactgtaacctccacctcccagattcaagcgatcctcttgcctcaacttcctg

SEQ ID NO: 107652 - DNA, 80 bp, synthetic construct; identical to SEQ ID NO: 20925
  source 1..80: mol_type = other DNA

SEQ ID NO: 107653 - DNA, 80 bp, synthetic construct
  source 1..80: mol_type = other DNA
gcgatctcggctcaccgcaacctctgcctcccaggttcaagcgattctcctgcctcagcctcccgagtagctgggattac

SEQ ID NO: 107654 - DNA, 80 bp, synthetic construct
  source 1..80: mol_type = other DNA
cttttctgttgtttgcactgacaaaacatcccctaccaaacagctcctttaatggcaggctcttttctttttttatttta

SEQ ID NO: 107655 - DNA, 80 bp, synthetic construct
  source 1..80: mol_type = other DNA
ttctcctgcctcagcctgctgagtagctaggactacaagcatgtgccaccacacctggctaattttgtacttctagtaga

SEQ ID NO: 107656 - DNA, 80 bp, synthetic construct; identical to SEQ ID NO: 20926
  source 1..80: mol_type = other DNA

SEQ ID NO: 107657 - DNA, 80 bp, synthetic construct
  source 1..80: mol_type = other DNA
caggtctacagacaggtctccctgtctttatctctcaaatcttcagtagcaactaaaatctccgtgtttttcagagcagg

SEQ ID NO: 107658 - DNA, 80 bp, synthetic construct
  source 1..80: mol_type = other DNA
agaatcttaacagtggctgctggtatcagtcttgaaggcctatatgtccagtgattccctaaacaatatagtacaagtac

SEQ ID NO: 107659 - DNA, 80 bp, synthetic construct; identical to SEQ ID NO: 20927
  source 1..80: mol_type = other DNA

SEQ ID NO: 107660 - DNA, 80 bp, synthetic construct
  source 1..80: mol_type = other DNA
ggattacaggcgcccaccactacacccagctaattcttgtatttttagtagagacggggtttcaccatgttaggttggtc

SEQ ID NO: 107661 - DNA, 80 bp, synthetic construct
  source 1..80: mol_type = other DNA
agcaattctcctgcctcagcctcctgagtagctgggattagaggtgcccgtcaccacgcctggctgattttttgtatttt

SEQ ID NO: 107662 - DNA, 80 bp, synthetic construct; identical to SEQ ID NO: 20928
  source 1..80: mol_type = other DNA

SEQ ID NO: 107663 - DNA, 80 bp, synthetic construct
  source 1..80: mol_type = other DNA
aggctggagtgcaatggtgcaatctcggctcactacaacctccgcctcccaggttcaagcgattctcctgcctaagcctc

SEQ ID NO: 107664 - DNA, 80 bp, synthetic construct; identical to SEQ ID NO: 20929
  source 1..80: mol_type = other DNA

SEQ ID NO: 107665 - DNA, 80 bp, synthetic construct
  source 1..80: mol_type = other DNA
tctcagctcactgcaagctccgccccctgagttcacgccattctcctgcctcagcctcccgagtagctgggactacaggc

SEQ ID NO: 107666 - DNA, 80 bp, synthetic construct
  source 1..80: mol_type = other DNA
atttctttttcttgcctggttaaaacctccagtatggtatcaacgttgtgagagtcaaatccttttctagttcctgatct

SEQ ID NO: 107667 - DNA, 80 bp, synthetic construct
  source 1..80: mol_type = other DNA
agctgggactataggcgcccgccaccatgcccggctaattttttgtttttgtatttttagtagagacggggtttcagcat

SEQ ID NO: 107668 - DNA, 80 bp, synthetic construct; identical to SEQ ID NO: 20930
  source 1..80: mol_type = other DNA

SEQ ID NO: 107669 - DNA, 80 bp, synthetic construct
  source 1..80: mol_type = other DNA
tatgtttccctttgttaatgtggtgaattacacagactgatttttttccccccagtaaagaccagtctgactatgttgcc

SEQ ID NO: 107670 - DNA, 80 bp, synthetic construct
  source 1..80: mol_type = other DNA
ctgcaccaggccaatttttgaatgttgaatcagctacaatcatgagataaacattatttggttagaatgtatttatcctt

SEQ ID NO: 107671 - DNA, 80 bp, synthetic construct
  source 1..80: mol_type = other DNA
agctaatttttttttttttttgagatgaagtcttgctctgtcgcccaggctggagtgcagtggcacgatcttggctcact

SEQ ID NO: 107672 - DNA, 80 bp, synthetic construct
  source 1..80: mol_type = other DNA
gcccacctcggcctcccaaagtgctgggattacaggcgtgagccaccgtgcccagcctgatttttgtatttttattagaa

SEQ ID NO: 107673 - DNA, 80 bp, synthetic construct; identical to SEQ ID NO: 20931
  source 1..80: mol_type = other DNA

SEQ ID NO: 107674 - DNA, 80 bp, synthetic construct
  source 1..80: mol_type = other DNA
tcggctcactgcaacctccgcttcccaggttcaagggattcttgtgcctcagcctcctgagtaactggcattacaggtat

SEQ ID NO: 107675 - DNA, 80 bp, synthetic construct
  source 1..80: mol_type = other DNA
tgttttctgaagagtttgtgtaagatgggtactgtttcttcctccaacgtttaaagagagcagagaacagaggagataaa

SEQ ID NO: 107676 - DNA, 80 bp, synthetic construct
  source 1..80: mol_type = other DNA
gtgtggtggagtaatcccagctactcgtgaggctgctagaggactgcttgagcccaggggttcgaggctgcagtaagcct

SEQ ID NO: 107677 - DNA, 80 bp, synthetic construct; identical to SEQ ID NO: 20932
  source 1..80: mol_type = other DNA

SEQ ID NO: 107678 - DNA, 80 bp, synthetic construct
  source 1..80: mol_type = other DNA
ataaatccactcctcttaagatactgtaaactctgtaaagcaaacaaataggcaagcaacagatcagaagaaaacattca

SEQ ID NO: 107679 - DNA, 80 bp, synthetic construct
  source 1..80: mol_type = other DNA
gaacatccttagtcaatagagaactgtaaattacaaccacaaggatataccacattagaaagactgacaatacctaatgt

SEQ ID NO: 107680 - DNA, 80 bp, synthetic construct
  source 1..80: mol_type = other DNA
aaggatataccacattagaaagactgacaatacctaatgtccggaaggctgtggcacaaccataataactcccatacctt

SEQ ID NO: 107681 - DNA, 80 bp, synthetic construct; identical to SEQ ID NO: 20933
  source 1..80: mol_type = other DNA

SEQ ID NO: 107682 - DNA, 80 bp, synthetic construct
  source 1..80: mol_type = other DNA
gtgtagtggcacgatcttggctcactgcaacctctgcctcccgggttcaagcgattctcctgcctcaccctcccgaatag

SEQ ID NO: 107683 - DNA, 80 bp, synthetic construct
  source 1..80: mol_type = other DNA
attccattctatatgaagttctccaacaggcaaaatggttatggagatcaaaataaaggtggggtcgggaatcgactggg

SEQ ID NO: 107684 - DNA, 80 bp, synthetic construct
  source 1..80: mol_type = other DNA
tacggcacaaagtggccggtacgcggcaggtgcatgggaagaaactgcggaatgaaacaaccgcgagctaagagatgggg

SEQ ID NO: 107685 - DNA, 80 bp, synthetic construct
  source 1..80: mol_type = other DNA
taacaggtagattgtttttccgacaaattatcaaacgacccatcattgcactctttcaaaatttgattctcagacgtacc

SEQ ID NO: 107686 - DNA, 80 bp, synthetic construct; identical to SEQ ID NO: 20934
  source 1..80: mol_type = other DNA

SEQ ID NO: 107687 - DNA, 80 bp, synthetic construct
  source 1..80: mol_type = other DNA
caaacaataacagggctgccgggcctctcagattgcgacggtcctcctcggcctggcgggcaaacccctggtttagcact

SEQ ID NO: 107688 - DNA, 80 bp, synthetic construct
  source 1..80: mol_type = other DNA
gagccccagttttcactaggatgccatgggctctaaaatatacagctatgagttctcaatgtttcgagatccaaaagtct

SEQ ID NO: 107689 - DNA, 80 bp, synthetic construct; identical to SEQ ID NO: 20935
  source 1..80: mol_type = other DNA

SEQ ID NO: 107690 - DNA, 80 bp, synthetic construct
  source 1..80: mol_type = other DNA
cagcccgaacgcaaagtgtccccggagcccagcagctacctgctccctggacggtggctctagacttttgagaagctcaa

SEQ ID NO: 107691 - DNA, 80 bp, synthetic construct
  source 1..80: mol_type = other DNA
gagaggaggaaggggggcaggagaaaaaagcttttccaaaaaagtattggctgtcttgaggaatgcggtcgcccccttgg

SEQ ID NO: 107692 - DNA, 80 bp, synthetic construct
  source 1..80: mol_type = other DNA
aaggagaacgccttggatcgagctgagcaggcggaggccgacaagaaggcggcggaagacaggagcaagcaggtctgcgc

SEQ ID NO: 107693 - DNA, 80 bp, synthetic construct
  source 1..80: mol_type = other DNA
caggcttagtctaacttagtctggtctgaggacgcttatttcccttctctggttcccatggcccgcgaaatcaagtccta

SEQ ID NO: 107694 - DNA, 80 bp, synthetic construct; identical to SEQ ID NO: 20936
  source 1..80: mol_type = other DNA

SEQ ID NO: 107695 - DNA, 80 bp, synthetic construct
  source 1..80: mol_type = other DNA
ctcgggtaaagaggaagttacctcgggtcctttgcactccaactcggcggcgccccgagcccgaggggccccagccaacc

SEQ ID NO: 107696 - DNA, 80 bp, synthetic construct
  source 1..80: mol_type = other DNA
ggaggacagcctcctggccgccgaagaggccgccgccaaggtacccggggcgcgcggcacggcgtggcgcacgaatggct

SEQ ID NO: 107697 - DNA, 80 bp, synthetic construct; identical to SEQ ID NO: 20937
  source 1..80: mol_type = other DNA

SEQ ID NO: 107698 - DNA, 80 bp, synthetic construct
  source 1..80: mol_type = other DNA
ccctgccatggcccagagcattggatgccgcctctgactgctactgcacacattcatttatatttcatccactcctctct

SEQ ID NO: 107699 - DNA, 80 bp, synthetic construct
  source 1..80: mol_type = other DNA
ttcttcactttctttccttttgccgtttccagtgggtgggaagttctgggtttggtggtgggtctagtcagggttcagag

SEQ ID NO: 107700 - DNA, 80 bp, synthetic construct
  source 1..80: mol_type = other DNA
ctgcagtctgaaggcactagatccagaaagtaagctgtgagttatatatagctcagtgctttatatggtatagtgagcta

SEQ ID NO: 107701 - DNA, 80 bp, synthetic construct; identical to SEQ ID NO: 20938
  source 1..80: mol_type = other DNA

SEQ ID NO: 107702 - DNA, 80 bp, synthetic construct
  source 1..80: mol_type = other DNA
cttttgtagcatgaaaggcttgagatgtatatccaggtgtgctttgtaaatgagaactccagagacgacatttaggatct

SEQ ID NO: 107703 - DNA, 80 bp, synthetic construct
  source 1..80: mol_type = other DNA
atgcctgctctatatatggctaaatggaagatgcctgcctcccgcaaattctccagcaggacgtttatttagctttttca

SEQ ID NO: 107704 - DNA, 80 bp, synthetic construct
  source 1..80: mol_type = other DNA
gctaacatgtctttattgaaaagtcttgttgaagggagcgctggaatggggtggggcagaaatgggaaagaagttattta

SEQ ID NO: 107705 - DNA, 80 bp, synthetic construct; identical to SEQ ID NO: 20939
  source 1..80: mol_type = other DNA

SEQ ID NO: 107706 - DNA, 80 bp, synthetic construct
  source 1..80: mol_type = other DNA
aggcgataggaattttttagttctattgtaatcttatgaggctactctcatatatgcagcccctcattgaccaaaacatc

SEQ ID NO: 107707 - DNA, 80 bp, synthetic construct
  source 1..80: mol_type = other DNA
tcagcttcctgaggtggaatcgtattacctttgggattaggacatttcattgtcattattcaccagtgtaaaacactttt

SEQ ID NO: 107708 - DNA, 80 bp, synthetic construct
  source 1..80: mol_type = other DNA
aggctgaaggggatcgaagactccatttttttctggcccccaatctcttccccagtaactgtgatatatctgatatttat

SEQ ID NO: 107709 - DNA, 80 bp, synthetic construct; identical to SEQ ID NO: 20940
  source 1..80: mol_type = other DNA

SEQ ID NO: 107710 - DNA, 80 bp, synthetic construct
  source 1..80: mol_type = other DNA
ggttcccccattctcaatgttggaggcccacagtctctgcacttaggggaccagctgtaacctccccacctgaccagatg

SEQ ID NO: 107711 - DNA, 80 bp, synthetic construct
  source 1..80: mol_type = other DNA
gcatgttttctttattattcccacacataagggagctggctttaagagctttctgtgacaaacctgaggagaaaaagccc

SEQ ID NO: 107712 - DNA, 80 bp, synthetic construct
  source 1..80: mol_type = other DNA
ctggattccaggagatctcagaggctggtctgacaccaaagaaggctgtaaagagaagagaccatttggatgactgtttt

SEQ ID NO: 107713 - DNA, 80 bp, synthetic construct; identical to SEQ ID NO: 20941
  source 1..80: mol_type = other DNA

SEQ ID NO: 107714 - DNA, 80 bp, synthetic construct
  source 1..80: mol_type = other DNA
gggatcaggccctttagggcatattccggctccagacccgccgctcagcttctctggctcccgggcatgggaatctggac

SEQ ID NO: 107715 - DNA, 80 bp, synthetic construct
  source 1..80: mol_type = other DNA
cgcagcgcgccgggagcgcctttctccccgccgccgcgagcatgcgcagtgcccccagccagtcccgggatccacggcgc

SEQ ID NO: 107716 - DNA, 80 bp, synthetic construct
  source 1..80: mol_type = other DNA
ggtccgcagggcagcagccggcctctcccactgcagccctcccgcccgcctaccgtccggcgcgatggcggggagtagct

SEQ ID NO: 107717 - DNA, 80 bp, synthetic construct
  source 1..80: mol_type = other DNA
tcccggggcagccccgcagggccctcctgcttccccccccgcaggccccggtccctcgtccccacgcctccagggcgcac

SEQ ID NO: 107718 - DNA, 80 bp, synthetic construct; identical to SEQ ID NO: 20942
  source 1..80: mol_type = other DNA

SEQ ID NO: 107719 - DNA, 80 bp, synthetic construct
  source 1..80: mol_type = other DNA
ggtagacagacattgacagcttgacagcgccgcgttctgctggaagagctaaactatagtgcaaaacccttaacccgtcc

SEQ ID NO: 107720 - DNA, 80 bp, synthetic construct
  source 1..80: mol_type = other DNA
tcttctaaggcaaatgtatccagcaaacacgaacaggatttcagaggtagtctagtattggatatttgtcgattttgtgt

SEQ ID NO: 107721 - DNA, 80 bp, synthetic construct
  source 1..80: mol_type = other DNA
ttcaagacctgaaatggtcctcttcagaggaaagctcaactagagaaagtttcagataaaatacaagcaggaataaggaa

SEQ ID NO: 107722 - DNA, 80 bp, synthetic construct; identical to SEQ ID NO: 20943
  source 1..80: mol_type = other DNA

SEQ ID NO: 107723 - DNA, 80 bp, synthetic construct
  source 1..80: mol_type = other DNA
agtgctccttcaccttcagttccccacccagcaagaggtcttaaagatggcctgctcatttcatgacatcataaaacact

SEQ ID NO: 107724 - DNA, 80 bp, synthetic construct
  source 1..80: mol_type = other DNA
gagagccttgtattggctcctggcctagtgattgatgttagacacaaaagataaattttatgaagggcacattattactt

SEQ ID NO: 107725 - DNA, 80 bp, synthetic construct
  source 1..80: mol_type = other DNA
gattgattgaacacagaaccttttaagacagcaacttgaagactggatcagaccattgaagagagactttcaggctgcaa

SEQ ID NO: 107726 - DNA, 80 bp, synthetic construct
  source 1..80: mol_type = other DNA
agagttggcctaaattcaaatactcagactgtaattaataggccctattaaaccagcccttaccttggaaaaagcagcca

SEQ ID NO: 107727 - DNA, 80 bp, synthetic construct; identical to SEQ ID NO: 20944
  source 1..80: mol_type = other DNA

SEQ ID NO: 107728 - DNA, 80 bp, synthetic construct
  source 1..80: mol_type = other DNA
taggcaaggcagaggcactacaatgccttgttcatgtctgttctccctcattatacaaatatgcttcataaattatgggc

SEQ ID NO: 107729 - DNA, 80 bp, synthetic construct
  source 1..80: mol_type = other DNA
ttcgtataactacagtttgcatgaaataaaaagacctgacctttgatcatcccaagttccactccagttcagtcaggact

SEQ ID NO: 107730 - DNA, 80 bp, synthetic construct; identical to SEQ ID NO: 20945
  source 1..80: mol_type = other DNA

SEQ ID NO: 107731 - DNA, 80 bp, synthetic construct
  source 1..80: mol_type = other DNA
cacttttgaaataaaagaaactagcatcccagattgaaagacttcactggcagtcagcacatgggctgctgttagaagaa

SEQ ID NO: 107732 - DNA, 80 bp, synthetic construct
  source 1..80: mol_type = other DNA
acgtgcctgtaatcctagctactggggaggctgaggcaggagaatcgcttgaacccgggaggtggaggttgcagtgagcc

SEQ ID NO: 107733 - DNA, 80 bp, synthetic construct
  source 1..80: mol_type = other DNA
tttatatctctgcttttagataacagatggtcatgtgtctatgggcttgtaccggcagaggcaacagcaggtccttaaga

SEQ ID NO: 107734 - DNA, 80 bp, synthetic construct
  source 1..80: mol_type = other DNA
agaaaaaagtggccctgattaaattataaaattaagcatatcttgaattctaacgagccaaacaaaaattctactaggcc

SEQ ID NO: 107735 - DNA, 80 bp, synthetic construct; identical to SEQ ID NO: 20946
  source 1..80: mol_type = other DNA

SEQ ID NO: 107736 - DNA, 80 bp, synthetic construct
  source 1..80: mol_type = other DNA
ccggagaacatctcaatctgatctcaggagagataaagacacaggagtgagaactgccagttccaaggtttccgtgatgt

SEQ ID NO: 107737 - DNA, 80 bp, synthetic construct
  source 1..80: mol_type = other DNA
agaagaatagccagcttctttgggtggtggcaaaggggattgtttatttatagtacagattcctgccctccccctttgac

SEQ ID NO: 107738 - DNA, 80 bp, synthetic construct
  source 1..80: mol_type = other DNA
ctgcctcagcctcctgagtagctgggattacaggcatgtgccaccatgcctggctaatttttgtgttttttgtagagacg

SEQ ID NO: 107739 - DNA, 80 bp, synthetic construct; identical to SEQ ID NO: 20947
  source 1..80: mol_type = other DNA

SEQ ID NO: 107740 - DNA, 80 bp, synthetic construct
  source 1..80: mol_type = other DNA
tctctgatgtccaggagtctgaggttctacagaatgcccctggggaaacaagagtggcatttagacaacagcattctgta

SEQ ID NO: 107741 - DNA, 80 bp, synthetic construct
  source 1..80: mol_type = other DNA
gggagctggggatagagacctgtcacccagagggttctttccccaaagcataaacagtcgtctttctgtgagtacaaagt

SEQ ID NO: 107742 - DNA, 80 bp, synthetic construct
  source 1..80: mol_type = other DNA
aaagaaagtgtacagtgcttttgagtacataacctagacactctatggaggctttttgttgttgtagggcttttggtttg

SEQ ID NO: 107743 - DNA, 80 bp, synthetic construct; identical to SEQ ID NO: 20948
  source 1..80: mol_type = other DNA

SEQ ID NO: 107744 - DNA, 80 bp, synthetic construct
  source 1..80: mol_type = other DNA
acacacacaccagaaacaacagtcatctgccagtaattcctagctgggtccatttaccagctgtgcactgataatgattt

SEQ ID NO: 107745 - DNA, 80 bp, synthetic construct
  source 1..80: mol_type = other DNA
cctctcttcccagataaaacttggcatttaaaatcttacaaatctaggtgagcaaagagctgaaggttctcagattcctt

SEQ ID NO: 107746 - DNA, 80 bp, synthetic construct; identical to SEQ ID NO: 20949
  source 1..80: mol_type = other DNA

SEQ ID NO: 107747 - DNA, 80 bp, synthetic construct
  source 1..80: mol_type = other DNA
tgcacaatatttaaacagccaccagtgcaagtgtgtataatggaccatcatagtcttataagtgttctgaggctcatagc

SEQ ID NO: 107748 - DNA, 80 bp, synthetic construct
  source 1..80: mol_type = other DNA
cttacatcaaaaacacttgggaaatttgtcttggctctgttccaatgaggccagttattctaaaaggggttactggattg

SEQ ID NO: 107749 - DNA, 80 bp, synthetic construct
  source 1..80: mol_type = other DNA
cgatttctggctgtactgctattgtcttacatggctgagcctgggtaagtcttgtctcagttcacacttcaggcccccag

SEQ ID NO: 107750 - DNA, 80 bp, synthetic construct
  source 1..80: mol_type = other DNA
ctggctaacacggtgaaaccccgtctctactaaaaatacaaaaaaattagccgggcgttgtggcgggcgcctgtagtccc

SEQ ID NO: 107751 - DNA, 80 bp, synthetic construct; identical to SEQ ID NO: 20950
  source 1..80: mol_type = other DNA

SEQ ID NO: 107752 - DNA, 80 bp, synthetic construct
  source 1..80: mol_type = other DNA
ccaactctgaaatgcttttcactctctacctaggctgaagccgacgtagcttctctgaacagacgcatccagctggttga

SEQ ID NO: 107753 - DNA, 80 bp, synthetic construct
  source 1..80: mol_type = other DNA
ttgaggtttaagaatttttcagtcccctggtggtgggatcatttcctctattgatcccaggtataactcggttggttttg

SEQ ID NO: 107754 - DNA, 80 bp, synthetic construct; identical to SEQ ID NO: 20951
  source 1..80: mol_type = other DNA

SEQ ID NO: 107755 - DNA, 80 bp, synthetic construct
  source 1..80: mol_type = other DNA
ggtctgcaaaagtaaaatattttggacttggtcttagtaatatacacaacacacatgcacacaaatagtcagatgctcgt

SEQ ID NO: 107756 - DNA, 80 bp, synthetic construct
  source 1..80: mol_type = other DNA
aggcattttcccttaagctcaactgttggaagtaaggatttgccatattgcatagaagtacttcaagagagactccatga

SEQ ID NO: 107757 - DNA, 80 bp, synthetic construct
  source 1..80: mol_type = other DNA
tcttactctttgaagtgaccctaccactaggtaccaggtataaagagtgatttcagactttaggattaaagaagattttt

SEQ ID NO: 107758 - DNA, 80 bp, synthetic construct; identical to SEQ ID NO: 20952
  source 1..80: mol_type = other DNA

SEQ ID NO: 107759 - DNA, 80 bp, synthetic construct
  source 1..80: mol_type = other DNA
cgaggcgggcagatcacttgaggccagggattcgagaccagcctggctaacgtggcataacccctaaatctactaaaaaa

SEQ ID NO: 107760 - DNA, 80 bp, synthetic construct
  source 1..80: mol_type = other DNA
aaataaaaataaaaaaatagtggttcacttatactgcctacttaaattttgataaatgaattccattttacatgacttgt

SEQ ID NO: 107761 - DNA, 80 bp, synthetic construct
  source 1..80: mol_type = other DNA
agtgtcaggcctgtctcccagcattgctgtcatgaaagggttccattataggtaaaacttaatttgatgcattcagttga

SEQ ID NO: 107762 - DNA, 80 bp, synthetic construct
  source 1..80: mol_type = other DNA
tgattttgttctagctttggttcatgtgcaagctgaggcttcccacaggaaaggcaagaaatctcattatctttttaata

SEQ ID NO: 107763 - DNA, 80 bp, synthetic construct; identical to SEQ ID NO: 20953
  source 1..80: mol_type = other DNA

SEQ ID NO: 107764 - DNA, 80 bp, synthetic construct
  source 1..80: mol_type = other DNA
aaaaagatgaagaaaaaatggaaattcaggagatccaactgaaagaggccaagcacattgctgaagatgccgaccgcaaa

SEQ ID NO: 107765 - DNA, 80 bp, synthetic construct
  source 1..80: mol_type = other DNA
aaacggttctaattttaatcctgctaggggatcccaggctttatcaggaagccaatcagtagcactgcgaagaaggacca

SEQ ID NO: 107766 - DNA, 80 bp, synthetic construct
  source 1..80: mol_type = other DNA
cacagacagtttctcagtggattcacagaggcctctctcctcaagggtggtagaaaactattatcaacgcaggttttcag

SEQ ID NO: 107767 - DNA, 80 bp, synthetic construct; identical to SEQ ID NO: 20954
  source 1..80: mol_type = other DNA

SEQ ID NO: 107768 - DNA, 80 bp, synthetic construct
  source 1..80: mol_type = other DNA
ggcagcccccacctttttagtacatgtctcatcctactgctgtttttgagattgtgaatgtgtattttatccctccttcc

SEQ ID NO: 107769 - DNA, 80 bp, synthetic construct
  source 1..80: mol_type = other DNA
tattgtttgtagacaaaacccttagggcctgatgggatctgatctctacccccatgcccttctgttacacaaagcttgca

SEQ ID NO: 107770 - DNA, 80 bp, synthetic construct
  source 1..80: mol_type = other DNA
ctaaacagcatgaccttctggcagctgcacattacctgtttcagctccgggctccttttgtgctcatttgatgtggatga

SEQ ID NO: 107771 - DNA, 80 bp, synthetic construct; identical to SEQ ID NO: 20955
  source 1..80: mol_type = other DNA

SEQ ID NO: 107772 - DNA, 80 bp, synthetic construct
  source 1..80: mol_type = other DNA
tatcttgccttaagtgctttcccttggtcctttatgctcctttgttttcccttcataaatgctctttgggcagccaaaaa

SEQ ID NO: 107773 - DNA, 80 bp, synthetic construct
  source 1..80: mol_type = other DNA
actttaaggcagcccttcgtctctaggactcagttttcattttttcccatccctctcctttttctctcctccttcctttg

SEQ ID NO: 107774 - DNA, 80 bp, synthetic construct
  source 1..80: mol_type = other DNA
ctgctcaaaagaggccctgccagaaagcaacacttacagtagacattttagtaaaatggcaatattgtgaggtgattttt

SEQ ID NO: 107775 - DNA, 80 bp, synthetic construct; identical to SEQ ID NO: 20956
  source 1..80: mol_type = other DNA

SEQ ID NO: 107776 - DNA, 80 bp, synthetic construct
  source 1..80: mol_type = other DNA
aaggaggtaatatgagagttgtggatgaagccaactggattttaaatgagtttgttttcatggaaccggtcagggccttt

SEQ ID NO: 107777 - DNA, 80 bp, synthetic construct
  source 1..80: mol_type = other DNA
ccctatgtttgtagctacaggaaacataaaacttcccaactttaactcaaataaatcattacaggctgagactcgggctg

SEQ ID NO: 107778 - DNA, 80 bp, synthetic construct
  source 1..80: mol_type = other DNA
ttgcacattcttcctgtgtgtcctctggggtttttctctgtggctcttgaactcatgaacctaagtcttctgctcacgag

SEQ ID NO: 107779 - DNA, 80 bp, synthetic construct; identical to SEQ ID NO: 20957
  source 1..80: mol_type = other DNA

SEQ ID NO: 107780 - DNA, 80 bp, synthetic construct
  source 1..80: mol_type = other DNA
ttccctaaggcacttaggttttattttagtaataaccactctatctcacagatatcctaaatgttgagctttgaagcttg

SEQ ID NO: 107781 - DNA, 80 bp, synthetic construct
  source 1..80: mol_type = other DNA
gaaacctgcagcattacaaaaactaagttgcagacttgccatataaagtgtggcgcccattgcttttcaagcctcctgga

SEQ ID NO: 107782 - DNA, 80 bp, synthetic construct
  source 1..80: mol_type = other DNA
tgcccttgcatttttttcccattgtttatagctgcagatgcctgactactccagtgtaattaaaatatagctctgcaaaa

SEQ ID NO: 107783 - DNA, 80 bp, synthetic construct; identical to SEQ ID NO: 20958
  source 1..80: mol_type = other DNA

SEQ ID NO: 107784 - DNA, 80 bp, synthetic construct
  source 1..80: mol_type = other DNA
tggaccacgctctcaacgatatgacttccatgtaaacgttcatccactctgcctgcttacaccctgccctcatgctaatg

SEQ ID NO: 107785 - DNA, 80 bp, synthetic construct
  source 1..80: mol_type = other DNA
cagaatccgtttattttgtaaacgctgaactagagcagtgaactagaatgagtgaccttgagcactgtccttttgggaaa

SEQ ID NO: 107786 - DNA, 80 bp, synthetic construct; identical to SEQ ID NO: 20959
  source 1..80: mol_type = other DNA

SEQ ID NO: 107787 - DNA, 80 bp, synthetic construct
  source 1..80: mol_type = other DNA
tggtggatgcctgtagtcccagctactcaggaggctgaggcaggagaatggcatgaacccgggaggtggagcttgcagtc

SEQ ID NO: 107788 - DNA, 80 bp, synthetic construct
  source 1..80: mol_type = other DNA
ccacaacctgtgtcaaataaatgggaaattaaacacagattgtacaatgtgagcttgggagttaatggcccagattttac

SEQ ID NO: 107789 - DNA, 80 bp, synthetic construct
  source 1..80: mol_type = other DNA
caccctgaattccattgaagctggaaatgtcattttccaagcccacctgtcattcatttacccatgcagaaaaaatggta

SEQ ID NO: 107790 - DNA, 80 bp, synthetic construct; identical to SEQ ID NO: 20960
  source 1..80: mol_type = other DNA

SEQ ID NO: 107791 - DNA, 80 bp, synthetic construct
  source 1..80: mol_type = other DNA
gggtgtggctggcagtggggtttgcatgactgcttcttgtctgtgtttcaagtgctctcatctattggtttggtttcctt

SEQ ID NO: 107792 - DNA, 80 bp, synthetic construct
  source 1..80: mol_type = other DNA
actgtgctttctattgtacagaagctcttcgtttcagtgtcaaataaacactgtgtaagctatttctgtttgctattctt

SEQ ID NO: 107793 - DNA, 80 bp, synthetic construct
  source 1..80: mol_type = other DNA
gaacttcaaaaaaatacccaggcctgcattccctctcagagttctgattttcaaaggttagaatgaggtctggacatctg

SEQ ID NO: 107794 - DNA, 80 bp, synthetic construct; identical to SEQ ID NO: 20961
  source 1..80: mol_type = other DNA

SEQ ID NO: 107795 - DNA, 80 bp, synthetic construct
  source 1..80: mol_type = other DNA
tctaaatatgattactctgtttagtcgtgatttgttttgtgctttttagcacatactctttgggagggattgtacataat

SEQ ID NO: 107796 - DNA, 80 bp, synthetic construct
  source 1..80: mol_type = other DNA
aagatagttggtggaaattgttcagaagacaattgtatttcatttgggcttctgttttatttcacaaacagcaattaagt

SEQ ID NO: 107797 - DNA, 80 bp, synthetic construct
  source 1..80: mol_type = other DNA
tagcccgagagggctgatataccaccatactcaaataaatttggacaaactcagaagatagtgtcattctcactctacag

SEQ ID NO: 107798 - DNA, 80 bp, synthetic construct
  source 1..80: mol_type = other DNA
ggcctgcttctgactatgattccttcctcattcttttttaaattcagaataagagaagtgtacccttctctgagtaaatc

SEQ ID NO: 107799 - DNA, 80 bp, synthetic construct; identical to SEQ ID NO: 20962
  source 1..80: mol_type = other DNA

SEQ ID NO: 107800 - DNA, 80 bp, synthetic construct
  source 1..80: mol_type = other DNA
caaggatatgagcatgtcttgtccctgcctttgggccacccatgcacaccagctccacagcagctgaagcagagcagatc

SEQ ID NO: 107801 - DNA, 80 bp, synthetic construct
  source 1..80: mol_type = other DNA
tccatagtgtgaatgtagtaatgggatatatgtcttggaacccccaagcatatgtcacgtgcaaaacaccgtgggaagca

SEQ ID NO: 107802 - DNA, 80 bp, synthetic construct
  source 1..80: mol_type = other DNA
ggaggtagcggacgtttgactggggtttggcatattcaaaaaatgtggatgagcaaagaggacagagcagcagatattcc

SEQ ID NO: 107803 - DNA, 80 bp, synthetic construct; identical to SEQ ID NO: 20963
  source 1..80: mol_type = other DNA

SEQ ID NO: 107804 - DNA, 80 bp, synthetic construct
  source 1..80: mol_type = other DNA
caagtttcgttcattttatacacatccattagcaccacacatgaatgccatcctcttcaagaagtaagcagatagggctg

SEQ ID NO: 107805 - DNA, 80 bp, synthetic construct
  source 1..80: mol_type = other DNA
agtcccagctactagggaggctgaggcaggagattggcatgaacccgggaggtggagcttgcagtgagctgagatcacgc

SEQ ID NO: 107806 - DNA, 80 bp, synthetic construct
  source 1..80: mol_type = other DNA
ccctgtattgtggtgactgggggaaggacagagacttaattccaaatttcaaaaaatttcagtgcagcaaaagcagtaac

SEQ ID NO: 107807 - DNA, 80 bp, synthetic construct; identical to SEQ ID NO: 20964
  source 1..80: mol_type = other DNA

SEQ ID NO: 107808 - DNA, 80 bp, synthetic construct
  source 1..80: mol_type = other DNA
accagttgctgtcctgcttgaggtctctttgtgttctctattaactgcctctcaccaagtctgctaacctgtcttccttc

SEQ ID NO: 107809 - DNA, 80 bp, synthetic construct
  source 1..80: mol_type = other DNA
tgcagaaaatctaagactgtcctaccttcaactaatagagttgaaaacagttgctttctgcagaaatgcaaatgcaagga

SEQ ID NO: 107810 - DNA, 80 bp, synthetic construct
  source 1..80: mol_type = other DNA
gaaatagcaggtcctcttgtttgaactgataaataatgaggagcccccccaaaaaatgttttctatttcctgacagccat

SEQ ID NO: 107811 - DNA, 80 bp, synthetic construct; identical to SEQ ID NO: 20965
  source 1..80: mol_type = other DNA

SEQ ID NO: 107812 - DNA, 80 bp, synthetic construct
  source 1..80: mol_type = other DNA
agaaaacctatttatgtcatctttgcttttgtgagtttgtgttaccgcacaactcccagacttttaactgcctgtacctt

SEQ ID NO: 107813 - DNA, 80 bp, synthetic construct
  source 1..80: mol_type = other DNA
agatgccctcccctccgtcttaggttcttgtctagaaatgagtaatgtcttacaagcatgcctagttctaatcatctcat

SEQ ID NO: 107814 - DNA, 80 bp, synthetic construct
  source 1..80: mol_type = other DNA
agaaaaccttagtatgcatcagatgctggatcagactttactggagttaaacaacatgtgaaaacctccttagctgcgac

SEQ ID NO: 107815 - DNA, 80 bp, synthetic construct; identical to SEQ ID NO: 20966
  source 1..80: mol_type = other DNA

SEQ ID NO: 107816 - DNA, 80 bp, synthetic construct
  source 1..80: mol_type = other DNA
tctgtccaacactaatttattttgtcttgagttttactacaagatgagactatggatcccgcatgcctgaattcactaaa

SEQ ID NO: 107817 - DNA, 80 bp, synthetic construct
  source 1..80: mol_type = other DNA
ggacgttttcttgagagttttaactatatgtaaacattgtataatgatatggaataaaatgcacattgtaggacattttc

SEQ ID NO: 107818 - DNA, 80 bp, synthetic construct; identical to SEQ ID NO: 20967
  source 1..80: mol_type = other DNA

SEQ ID NO: 107819 - DNA, 80 bp, synthetic construct
  source 1..80: mol_type = other DNA
tagtgccatacccaaaagtattacttcagaaatttactttaatatcatatttatattaaaatattttatttgtctccatg

SEQ ID NO: 107820 - DNA, 80 bp, synthetic construct
  source 1..80: mol_type = other DNA
acacagcgccctaaaagagtaggtattcaataaacagtcattgaatgaaagaattaatggacaaaccattctgttctatg

SEQ ID NO: 107821 - DNA, 80 bp, synthetic construct; identical to SEQ ID NO: 20968
  source 1..80: mol_type = other DNA

SEQ ID NO: 107822 - DNA, 80 bp, synthetic construct
  source 1..80: mol_type = other DNA
aaaataaatcacttggctagtattggctctggctatctcaggccttgctgatggtaattacaatgctagaaaggataact

SEQ ID NO: 107823 - DNA, 80 bp, synthetic construct
  source 1..80: mol_type = other DNA
gggatgcactgtcgagtagattaaaaattgttatccatgtcattggcactgatgaccagttacctaaaatacaagtaaga

SEQ ID NO: 107824 - DNA, 80 bp, synthetic construct
  source 1..80: mol_type = other DNA
ctaaaatttcacccaggtgacatttttattaagacacagtctggagaaatttcagaattccacatctcatttgctaatat

SEQ ID NO: 107825 - DNA, 80 bp, synthetic construct; identical to SEQ ID NO: 20969
  source 1..80: mol_type = other DNA

SEQ ID NO: 107826 - DNA, 80 bp, synthetic construct
  source 1..80: mol_type = other DNA
ctatgttgtcattaaaaaaataatagctaactgaagccaggaattcattttgcaattgtgtcaattattttaaagatacc

SEQ ID NO: 107827 - DNA, 80 bp, synthetic construct
  source 1..80: mol_type = other DNA
ctttccgtccacaccaggccaaagagcaaaatgttttcacagaaattctctgggttgcatattcttaattgcctgaacta

SEQ ID NO: 107828 - DNA, 80 bp, synthetic construct
  source 1..80: mol_type = other DNA
tgtacccatccaagtagacacactggaagaaactgatgggacctaaggaacagagcatgacagtttgttaaaacatgcag

SEQ ID NO: 107829 - DNA, 80 bp, synthetic construct
  source 1..80: mol_type = other DNA
gtataacatcaaaacaacgaaaaccgcacagaaatattatgacagttaaatgagttacatgagttacatgtgctcttaaa

SEQ ID NO: 107830 - DNA, 80 bp, synthetic construct; identical to SEQ ID NO: 20970
  source 1..80: mol_type = other DNA

SEQ ID NO: 107831 - DNA, 80 bp, synthetic construct
  source 1..80: mol_type = other DNA
aaaagatggcgagtttagcatctcctcacaatcttgggtgcctacaaacttccagtgttttctatcctatccatttgcat

SEQ ID NO: 107832 - DNA, 80 bp, synthetic construct
  source 1..80: mol_type = other DNA
gcaaccagggagtattctgattccatttccatgggtcactgggttttcagggatgacaatagtttgaagaatcttgaatt

SEQ ID NO: 107833 - DNA, 80 bp, synthetic construct; identical to SEQ ID NO: 20971
  source 1..80: mol_type = other DNA

SEQ ID NO: 107834 - DNA, 80 bp, synthetic construct
  source 1..80: mol_type = other DNA
gccttcttgtaagacgaagatagcaaatatcattttgatgcaatagatcccccaactgaggttagaatatttgacaccat

SEQ ID NO: 107835 - DNA, 80 bp, synthetic construct
  source 1..80: mol_type = other DNA
ttcaatggtaacatattgtaaaactatagaacaatattccaactaggaaactggtattgatacaattcacctgtctcatt

SEQ ID NO: 107836 - DNA, 80 bp, synthetic construct
  source 1..80: mol_type = other DNA
gtccagattgacctataattctttttcttatggattttgtaatattactcaaagtatcataagactctgcttatttccct

SEQ ID NO: 107837 - DNA, 80 bp, synthetic construct; identical to SEQ ID NO: 20972
  source 1..80: mol_type = other DNA

SEQ ID NO: 107838 - DNA, 80 bp, synthetic construct
  source 1..80: mol_type = other DNA
aataatgagaaacttgggcattgaattttgtaactgcacatgaatattgattggattctaaaataaatgatcccaaagtt

SEQ ID NO: 107839 - DNA, 80 bp, synthetic construct
  source 1..80: mol_type = other DNA
aggcagtaagacacatttaagcatagattcagccagagtactaaggatcagaaatatgtagaaggatttgcgataaatgc

SEQ ID NO: 107840 - DNA, 80 bp, synthetic construct
  source 1..80: mol_type = other DNA
atttttacatagatgtagcatctttaatacagaatgatttattacttttaatctcattataaacttacttttctgctttg

SEQ ID NO: 107841 - DNA, 80 bp, synthetic construct
  source 1..80: mol_type = other DNA
atttgtacacagattctattcatattttcactgtaaaatttaataggcaagagccagagagagaaagggaacccatgaaa

SEQ ID NO: 107842 - DNA, 80 bp, synthetic construct; identical to SEQ ID NO: 20973
  source 1..80: mol_type = other DNA

SEQ ID NO: 107843 - DNA, 80 bp, synthetic construct
  source 1..80: mol_type = other DNA
ccctttcttccgattagaagttcttaactggtatccacgaatggggttttgggggtttttctataaaacattgaaataat

SEQ ID NO: 107844 - DNA, 80 bp, synthetic construct
  source 1..80: mol_type = other DNA
ttgatttatttatataaatgcagatttttaggttctaactcagatatttaattctagggagacctacagttgatctgtat

SEQ ID NO: 107845 - DNA, 80 bp, synthetic construct; identical to SEQ ID NO: 20974
  source 1..80: mol_type = other DNA

SEQ ID NO: 107846 - DNA, 80 bp, synthetic construct
  source 1..80: mol_type = other DNA
ttacaaagtggtcaaaggacatgaacaggtacttttcaaatgaagacatacattcaatcaacaagcgtatgaaaaaaagc

SEQ ID NO: 107847 - DNA, 80 bp, synthetic construct
  source 1..80: mol_type = other DNA
tagttcaactattgtggaaagcagtgtgatgattcctcaaagagctaaaaacagaactatcattcaacccagcaatccca

SEQ ID NO: 107848 - DNA, 80 bp, synthetic construct
  source 1..80: mol_type = other DNA
ggaaggagaaagaggatcagaaaaaataactaatggatggcaggattaatacctgggtgatgaaataatctgtacaacaa

SEQ ID NO: 107849 - DNA, 80 bp, synthetic construct; identical to SEQ ID NO: 20975
  source 1..80: mol_type = other DNA

SEQ ID NO: 107850 - DNA, 80 bp, synthetic construct
  source 1..80: mol_type = other DNA
aaaatcatggcattcttgtaattcttaatggaatagtgattttgaagtattattcctgtagattggcaaataaatgcatc

SEQ ID NO: 107851 - DNA, 80 bp, synthetic construct
  source 1..80: mol_type = other DNA
aaaaaaaaaagacagacaaaaaccttatagctttgagagaaaacttgtaaatgatccaaagacagcaaactcacctttag

SEQ ID NO: 107852 - DNA, 80 bp, synthetic construct
  source 1..80: mol_type = other DNA
cacaagatccctgaatctacaaactcagcatctacagtctccataaataagagctgtctgaccaaaacaggcacttctct

SEQ ID NO: 107853 - DNA, 80 bp, synthetic construct; identical to SEQ ID NO: 20976
  source 1..80: mol_type = other DNA

SEQ ID NO: 107854 - DNA, 80 bp, synthetic construct
  source 1..80: mol_type = other DNA
tatctatatgcaaaaggatgaaagtggacctttatcttccaccaccccaaaatcaattcaaaatggatttaaagacttaa

SEQ ID NO: 107855 - DNA, 80 bp, synthetic construct
  source 1..80: mol_type = other DNA
gaaacaatgaacaaaatgaaaaggcaaattatgaaatgggagaaaatatttgcaagccatatatccaaaggaggttgata

SEQ ID NO: 107856 - DNA, 80 bp, synthetic construct
  source 1..80: mol_type = other DNA
gagatattacctcacatctgttagactagtgattatcaaaaagtcaaatgagatgtgctggtgaggatttaagagaaaag

SEQ ID NO: 107857 - DNA, 80 bp, synthetic construct; identical to SEQ ID NO: 20977
  source 1..80: mol_type = other DNA

SEQ ID NO: 107858 - DNA, 80 bp, synthetic construct
  source 1..80: mol_type = other DNA
aattagtggggaaaggaagacactacatttgaactaaagctcaaatacatacacaatgactcttaagttgtattgtgtaa

SEQ ID NO: 107859 - DNA, 80 bp, synthetic construct
  source 1..80: mol_type = other DNA
agattttgcatactaactgttcactaataaatgaaaaaggggtaagatagggtcagtatgcaaatttcgtctaacaggaa

SEQ ID NO: 107860 - DNA, 80 bp, synthetic construct
  source 1..80: mol_type = other DNA
aaaatgaccatggtcttgaactgcttaatcaactgctataaataatgaaacagtacaaactgttatatgatgttgtgaaa

SEQ ID NO: 107861 - DNA, 80 bp, synthetic construct; identical to SEQ ID NO: 20978
  source 1..80: mol_type = other DNA

SEQ ID NO: 107862 - DNA, 80 bp, synthetic construct
  source 1..80: mol_type = other DNA
aattcaagaaaggaataaggcacttactgtctacttattcttacaacttgcacgttgagtgagtggtagttttgataaaa

SEQ ID NO: 107863 - DNA, 80 bp, synthetic construct
  source 1..80: mol_type = other DNA
gatgccaaaattaaagtgagggcaacaatatgaaaaaaggctagagacagcgaaggacagagatattcagggagtagagg

SEQ ID NO: 107864 - DNA, 80 bp, synthetic construct
  source 1..80: mol_type = other DNA
aatgaatgcagagaatgcaatttggcaagtgttctaatagcacagaaatagtacattctccaagtaggagtcactgaagg

SEQ ID NO: 107865 - DNA, 80 bp, synthetic construct; identical to SEQ ID NO: 20979
  source 1..80: mol_type = other DNA

SEQ ID NO: 107866 - DNA, 80 bp, synthetic construct
  source 1..80: mol_type = other DNA
gttaatatttcttaagattttctacatgctaggccctattaagttatttcatatgtgttaacacgtttgatcctgaacaa

SEQ ID NO: 107867 - DNA, 80 bp, synthetic construct
  source 1..80: mol_type = other DNA
tactgtacaaatagaggagagagaggtcctgcccaaggtcacaaaactcatgagtggcagagacagaacaagaacataat

SEQ ID NO: 107868 - DNA, 80 bp, synthetic construct
  source 1..80: mol_type = other DNA
tgttctaaacataatccaaatctcctatatcagggcctcttgaaagagtgttgaaatttatcccatgaatagtacacctg

SEQ ID NO: 107869 - DNA, 80 bp, synthetic construct
  source 1..80: mol_type = other DNA
tggtttttaagactatggcattctggttccagagatggtgctgttaatcactaagccattctgcctgcattagtttgttt

SEQ ID NO: 107870 - DNA, 80 bp, synthetic construct; identical to SEQ ID NO: 20980
  source 1..80: mol_type = other DNA

SEQ ID NO: 107871 - DNA, 80 bp, synthetic construct
  source 1..80: mol_type = other DNA
tgcctctggaggatgaacttctaaacccacttctctctgattctagtacccatgcattatgttgcctaacatacctgctg

SEQ ID NO: 107872 - DNA, 80 bp, synthetic construct
  source 1..80: mol_type = other DNA
ctgcacttctaacaatctactctccctcagtggcgatgaaaagttacttagttgtctttgaaaataaagacaatgaagag

SEQ ID NO: 107873 - DNA, 80 bp, synthetic construct; identical to SEQ ID NO: 20981
  source 1..80: mol_type = other DNA

SEQ ID NO: 107874 - DNA, 80 bp, synthetic construct
  source 1..80: mol_type = other DNA
aagtcctggattttgtttggtcaagtagtccttgtattttctggttaactgaaggactttctcctttgtcctaaatccat

SEQ ID NO: 107875 - DNA, 80 bp, synthetic construct
  source 1..80: mol_type = other DNA
ttatctccaatactgttctgcagccatgggtcaaaaaagtttcatggccaatgggatttttaacagggttcaggtgttaa

SEQ ID NO: 107876 - DNA, 80 bp, synthetic construct
  source 1..80: mol_type = other DNA
ggactctaattacaattggctgataaaaattccaagtatatgagaaaatgtaaagtccagcctcagcaccaatggtaggt

SEQ ID NO: 107877 - DNA, 80 bp, synthetic construct; identical to SEQ ID NO: 20982
  source 1..80: mol_type = other DNA

SEQ ID NO: 107878 - DNA, 80 bp, synthetic construct
  source 1..80: mol_type = other DNA
atgttcatcagtgatagactggaataagaaaatgcagcacatatacaccatgtaatactatgcagccataaaaaaaggat

SEQ ID NO: 107879 - DNA, 80 bp, synthetic construct
  source 1..80: mol_type = other DNA
gcctgtcttgcggtgggaggaggggggagggatagtattaggagatatgcctaatgtaaatgacgagttagtgggtgcag

SEQ ID NO: 107880 - DNA, 80 bp, synthetic construct
  source 1..80: mol_type = other DNA
atcatatatttgcaaaacaatttactagaaacatattcatagcatttttcatagatggttggaatctcagtttcttcttc

SEQ ID NO: 107881 - DNA, 80 bp, synthetic construct
  source 1..80: mol_type = other DNA
agttacttttccagcaacaactatgagaactacaatgagatatttttctgtgccaggtatgctactaggtactagatttt

SEQ ID NO: 107882 - DNA, 80 bp, synthetic construct; identical to SEQ ID NO: 20983
  source 1..80: mol_type = other DNA

SEQ ID NO: 107883 - DNA, 80 bp, synthetic construct
  source 1..80: mol_type = other DNA
tcttacgtagatcaaagaagttttttatggacactcttccactggtgatggactttgaacaatcgtaatgaattgcattg

SEQ ID NO: 107884 - DNA, 80 bp, synthetic construct
  source 1..80: mol_type = other DNA
atagaggccctagactcctgggcttagaaatgtagaatttattccaaatttacaatgaagaaatagtcagtgtttctcac

SEQ ID NO: 107885 - DNA, 80 bp, synthetic construct
  source 1..80: mol_type = other DNA
acaagtaatactgattggtcaaagtagaattcaaagttttatgtctaagtgactaaagagtggaagtcagatggcaagag

SEQ ID NO: 107886 - DNA, 80 bp, synthetic construct; identical to SEQ ID NO: 20984
  source 1..80: mol_type = other DNA

SEQ ID NO: 107887 - DNA, 80 bp, synthetic construct
  source 1..80: mol_type = other DNA
taacaataggggagaagtgagcaaaaggtaattcagctttacaatttggaacgctgtgttgaacttgaggttagctattt

SEQ ID NO: 107888 - DNA, 80 bp, synthetic construct
  source 1..80: mol_type = other DNA
aaaaagacaacagctctgagaagcagaaagggcaaggaaaattttgtacaaaggaatatttgtaggcagaggtaggagaa

SEQ ID NO: 107889 - DNA, 80 bp, synthetic construct
  source 1..80: mol_type = other DNA
ggctgatgatagggaatatacaaaagagtaaaaagagattgtaatttggggagaaggcaaactttgaagaacccacattt

SEQ ID NO: 107890 - DNA, 80 bp, synthetic construct; identical to SEQ ID NO: 20985
  source 1..80: mol_type = other DNA

SEQ ID NO: 107891 - DNA, 80 bp, synthetic construct
  source 1..80: mol_type = other DNA
gagttcacattttcctaagaaatcttaaaaacccacggtagttcaaagcaacatttgacagccagtttattttagctctc

SEQ ID NO: 107892 - DNA, 80 bp, synthetic construct
  source 1..80: mol_type = other DNA
aactatgcagggaaatttcacatttgggattttgtaggcagcacacagtgaagccaggagtgttcaatgaatgtatgcga

SEQ ID NO: 107893 - DNA, 80 bp, synthetic construct; identical to SEQ ID NO: 20986
  source 1..80: mol_type = other DNA

SEQ ID NO: 107894 - DNA, 80 bp, synthetic construct
  source 1..80: mol_type = other DNA
tgaaatctgtcccttgctaggggagtaacccattgtcattacataatcatcatcatcctcattcttatagttaccaatta

SEQ ID NO: 107895 - DNA, 80 bp, synthetic construct
  source 1..80: mol_type = other DNA
aagtcatgatgggaaccagtacttctgacgctagtttccctggtatcgactactaccctatgataccatctgtatacata

SEQ ID NO: 107896 - DNA, 80 bp, synthetic construct
  source 1..80: mol_type = other DNA
tcatatatatgtgtgtgcatttatgtataggtatgtgtatatatgtttataaacacacatatattaaatatatatacacc

SEQ ID NO: 107897 - DNA, 80 bp, synthetic construct
  source 1..80: mol_type = other DNA
tgatgaagcactcgctaaatttttaatgacataattagttttacacaattgtctagaactgggacgtaagatatcttgtt

SEQ ID NO: 107898 - DNA, 80 bp, synthetic construct; identical to SEQ ID NO: 20987
  source 1..80: mol_type = other DNA

SEQ ID NO: 107899 - DNA, 80 bp, synthetic construct
  source 1..80: mol_type = other DNA
gtgagaacataatagcagtagagatcttaaatttccttcatatttctccccccaaaatggatagaataggtagacagcaa

SEQ ID NO: 107900 - DNA, 80 bp, synthetic construct
  source 1..80: mol_type = other DNA
gccaataggtatttcccaaaggaagttagactgatgagatcatcagctaaagttatgagggactttgtcaagtccaatag

SEQ ID NO: 107901 - DNA, 80 bp, synthetic construct
  source 1..80: mol_type = other DNA
gtggaataaaagttgagcaagacagggtcagtaaagacaaagaaaaagataaggtcaggtaagtgagaaaaagcaaccca

SEQ ID NO: 107902 - DNA, 80 bp, synthetic construct; identical to SEQ ID NO: 20988
  source 1..80: mol_type = other DNA

SEQ ID NO: 107903 - DNA, 80 bp, synthetic construct
  source 1..80: mol_type = other DNA
gctgcacatatgaatttttattcctgagaaatattctgttgtgtggatgtactacagcttctatatccatttgcctgttg

SEQ ID NO: 107904 - DNA, 80 bp, synthetic construct
  source 1..80: mol_type = other DNA
cagtaccattttgccttcccgacagcaatgtatgaaagttctggttgtttcaaatgcttgccagcacttgtttttgtttt

SEQ ID NO: 107905 - DNA, 80 bp, synthetic construct; identical to SEQ ID NO: 20989
  source 1..80: mol_type = other DNA

SEQ ID NO: 107906 - DNA, 80 bp, synthetic construct
  source 1..80: mol_type = other DNA
tgtgaggttaagatagcagtttattttcaaaaaatacatagatgtccaattgtttgagtgccattggttaaaaagtctac

SEQ ID NO: 107907 - DNA, 80 bp, synthetic construct
  source 1..80: mol_type = other DNA
atactcttgtgattactgtaagtgtacagtaacatttaaaattaggtaatatgattattccaaatttgttcttttaaaaa

SEQ ID NO: 107908 - DNA, 80 bp, synthetic construct
  source 1..80: mol_type = other DNA
attttctttaataatttttatcatcaccttgtggttttcaacatatagatcatatatgcattttgatttatacataattt

SEQ ID NO: 107909 - DNA, 80 bp, synthetic construct
  source 1..80: mol_type = other DNA
gagtgcagtggcacaatcttggctcactgcaaactctgcctcgctggttcaagggattttcctctctcagcttcccgagt

SEQ ID NO: 107910 - DNA, 80 bp, synthetic construct; identical to SEQ ID NO: 20990
  source 1..80: mol_type = other DNA

SEQ ID NO: 107911 - DNA, 80 bp, synthetic construct
  source 1..80: mol_type = other DNA
aaattcctgtgccctgaaagtatgtcacaataagaagaaatcctcatcccaacaaactatagtaacactgcagcagaaca

SEQ ID NO: 107912 - DNA, 80 bp, synthetic construct
  source 1..80: mol_type = other DNA
tcctcatcccaacaaactatagtaacactgcagcagaacaaaggctaagagaacatacttgaagaaggcagagagaaaag

SEQ ID NO: 107913 - DNA, 80 bp, synthetic construct
  source 1..80: mol_type = other DNA
ggaatgaaatgatatagaaaagctgtcaagtaagtaaaaactgagaatgttttctactaacagaactctacccaaggcaa

SEQ ID NO: 107914 - DNA, 80 bp, synthetic construct; identical to SEQ ID NO: 20991
  source 1..80: mol_type = other DNA

SEQ ID NO: 107915 - DNA, 80 bp, synthetic construct
  source 1..80: mol_type = other DNA
cattgagagagcatgagaaagagaaagcaacaagacagtgagaaccagacctaagatattaataatcatgataaatgtaa

SEQ ID NO: 107916 - DNA, 80 bp, synthetic construct
  source 1..80: mol_type = other DNA
accaaaagaaagctggaataattatattaatatcagacatactgcataatactcttttttgttttattttgttttgtttt

SEQ ID NO: 107917 - DNA, 80 bp, synthetic construct
  source 1..80: mol_type = other DNA
ttagtagagacagggtttcaccatgtaggccaggatggtcttgatctcctgacctcatgatctgcccacctcggccttcc

SEQ ID NO: 107918 - DNA, 80 bp, synthetic construct
  source 1..80: mol_type = other DNA
ctgatataaaaattgattaaactacagggataaactgataatttctcatcataggaggagatgtcaatatagtttattca

SEQ ID NO: 107919 - DNA, 80 bp, synthetic construct; identical to SEQ ID NO: 20992
  source 1..80: mol_type = other DNA

SEQ ID NO: 107920 - DNA, 80 bp, synthetic construct
  source 1..80: mol_type = other DNA
tgctgaaatagtgcttaaaggaaaatttattgctgttacatacatatgtaaaagtagaaaggaaatagattaataaaata

SEQ ID NO: 107921 - DNA, 80 bp, synthetic construct
  source 1..80: mol_type = other DNA
tactgataaatctgagaagcataacattaagtaaaaaatttcagagtatgttctacaatgtgctacacacacacagagat

SEQ ID NO: 107922 - DNA, 80 bp, synthetic construct; identical to SEQ ID NO: 20993
  source 1..80: mol_type = other DNA

SEQ ID NO: 107923 - DNA, 80 bp, synthetic construct
  source 1..80: mol_type = other DNA
tgaaacaacgtaaaaaaaaagccataaataacagttatatatttatagcaatggattttttttcacaaacaatattaaca

SEQ ID NO: 107924 - DNA, 80 bp, synthetic construct
  source 1..80: mol_type = other DNA
gacttgttctataactacatccgaattagactattaaattttcttgtgcagtgctagatatgggactggcatatgttgta

SEQ ID NO: 107925 - DNA, 80 bp, synthetic construct
  source 1..80: mol_type = other DNA
atgctagaaagtatcattaatttaattatgtaaaaaaggaaagcaaagatgctatcaacataaaatgaagtatattctgt

SEQ ID NO: 107926 - DNA, 80 bp, synthetic construct; identical to SEQ ID NO: 20994
  source 1..80: mol_type = other DNA

SEQ ID NO: 107927 - DNA, 80 bp, synthetic construct
  source 1..80: mol_type = other DNA
taattttatcttatgcttaaatttcagactaattttcaaagtgcttaattctgacatctaaaatatctattatactctaa

SEQ ID NO: 107928 - DNA, 80 bp, synthetic construct
  source 1..80: mol_type = other DNA
cttttctagcaggcttggttgaaacttcattataaagtagtaaacttctagaaaagactaaatttattattatggagatg

SEQ ID NO: 107929 - DNA, 80 bp, synthetic construct
  source 1..80: mol_type = other DNA
aaacctccgcatacaataatctcaagaaatgttcctactacactatttcatttgaaatactcattttgaggatctaacaa

SEQ ID NO: 107930 - DNA, 80 bp, synthetic construct; identical to SEQ ID NO: 20995
  source 1..80: mol_type = other DNA

SEQ ID NO: 107931 - DNA, 80 bp, synthetic construct
  source 1..80: mol_type = other DNA
taataaaatctcacacatcctcctcccaatgtcttcctccaaactccatgagaagcacattatttatcatatatttacca

SEQ ID NO: 107932 - DNA, 80 bp, synthetic construct
  source 1..80: mol_type = other DNA
ctgtttagattcagctaatacgagcctcttccatggaaagaaacaaaagtatcaagtagatagtcagactttgaatagat

SEQ ID NO: 107933 - DNA, 80 bp, synthetic construct
  source 1..80: mol_type = other DNA
cacatttcagccacagactaacaatactagatatgggagagttcctcaactcttgcaggcctcaagattaacatggagag

SEQ ID NO: 107934 - DNA, 80 bp, synthetic construct
  source 1..80: mol_type = other DNA
gacaaggtcaaggagggagaaggaaggcctggcactttcatgatgtgccccgaagacaaattccactgttgctgctgaag

SEQ ID NO: 107935 - DNA, 80 bp, synthetic construct; identical to SEQ ID NO: 20996
  source 1..80: mol_type = other DNA

SEQ ID NO: 107936 - DNA, 80 bp, synthetic construct
  source 1..80: mol_type = other DNA
aatagatcccaatggaaaagaaaatcacaaaatcccacaaaaacaatcaaaatactgatttcaaagaagttcagtgagat

SEQ ID NO: 107937 - DNA, 80 bp, synthetic construct
  source 1..80: mol_type = other DNA
gaattcattgataaaatacaaaacacattggaaacctttatcaagtaaaagaaaatcaagtaaaagaaagaaaaatcaag

SEQ ID NO: 107938 - DNA, 80 bp, synthetic construct; identical to SEQ ID NO: 20997
  source 1..80: mol_type = other DNA

SEQ ID NO: 107939 - DNA, 80 bp, synthetic construct
  source 1..80: mol_type = other DNA
aacaaagatcaaagttagataaatccacgaagatgagaaaaagctagtgcaaaaatgctgaaaattccaaaaactagaat

SEQ ID NO: 107940 - DNA, 80 bp, synthetic construct
  source 1..80: mol_type = other DNA
agagccatgagaaaagattacaggagctgctaactagaataaccagtttagagaagaacataaatgactgatggagccga

SEQ ID NO: 107941 - DNA, 80 bp, synthetic construct; identical to SEQ ID NO: 20998
  source 1..80: mol_type = other DNA

SEQ ID NO: 107942 - DNA, 80 bp, synthetic construct
  source 1..80: mol_type = other DNA
gaaaaaatgttaagggcagctagagagaaaggtcaggtcacccacaaagggaagcccatcagactaacagcagatctctc

SEQ ID NO: 107943 - DNA, 80 bp, synthetic construct
  source 1..80: mol_type = other DNA
accaccaggcctgccttacaagagctcctgaagcaagcactaaatatggaaaagaaaaactgttaccagtcactgcaaaa

SEQ ID NO: 107944 - DNA, 80 bp, synthetic construct
  source 1..80: mol_type = other DNA
gtaaattggatagagtcaagactcatcagtgtgctgtattcaggagacacgtcacacatgcaaatacacacataggctca

SEQ ID NO: 107945 - DNA, 80 bp, synthetic construct; identical to SEQ ID NO: 20999
  source 1..80: mol_type = other DNA

SEQ ID NO: 107946 - DNA, 80 bp, synthetic construct
  source 1..80: mol_type = other DNA
aaaatatacattcttttcagcaccacatagcacttattccaagattgaccacatagttggaagtaaagcactcctcagca

SEQ ID NO: 107947 - DNA, 80 bp, synthetic construct; identical to SEQ ID NO: 21000
  source 1..80: mol_type = other DNA

SEQ ID NO: 107948 - DNA, 80 bp, synthetic construct
  source 1..80: mol_type = other DNA
gagacacaaaaatcccttctaaaaatcaatgaatctaggagctgttttttgaaatgattagcaaaatagaccactagcca

SEQ ID NO: 107949 - DNA, 80 bp, synthetic construct
  source 1..80: mol_type = other DNA
ccaggacacatacaccctcccaagaccaaaccaggaagaagtcaaatccctgaatagaccaataaaacgttctgaaattg

SEQ ID NO: 107950 - DNA, 80 bp, synthetic construct; identical to SEQ ID NO: 21001
  source 1..80: mol_type = other DNA

SEQ ID NO: 107951 - DNA, 80 bp, synthetic construct
  source 1..80: mol_type = other DNA
taaacagaatcaatgacaaaaaccacatgattatctcaatagatgcggaaaagtcctttgattaaattcaacactccttc

SEQ ID NO: 107952 - DNA, 80 bp, synthetic construct
  source 1..80: mol_type = other DNA
tcctatttaacatagtgttggaagttctaaccagggcaatcaggcaagagaaagaaagcatattttaataggaagagaag

SEQ ID NO: 107953 - DNA, 80 bp, synthetic construct
  source 1..80: mol_type = other DNA
acaaacagagagccaaatcatgagtgaactcccattcacaattgctacaaagagaataaaatatctaggaatacaactaa

SEQ ID NO: 107954 - DNA, 80 bp, synthetic construct; identical to SEQ ID NO: 21002
  source 1..80: mol_type = other DNA

SEQ ID NO: 107955 - DNA, 80 bp, synthetic construct
  source 1..80: mol_type = other DNA
acaccacacatctacaaccacctgatctttgacagacctgacaaaaacaaacaatgggaaaaggattctctatttaataa

SEQ ID NO: 107956 - DNA, 80 bp, synthetic construct
  source 1..80: mol_type = other DNA
cagctagcctaagcaggaatataagaaataagatccaaataaactcagaggaaaaaggagacagtataacagataccaca

SEQ ID NO: 107957 - DNA, 80 bp, synthetic construct
  source 1..80: mol_type = other DNA
tggtggtgggcacctgtaatcccagctactccagaggctgaggcagaagaattgcttgaacccaggaggcagaagttgca

SEQ ID NO: 107958 - DNA, 80 bp, synthetic construct
  source 1..80: mol_type = other DNA
accaagatcgaatcaagaagaaataggacctgaacagaccaactgtagcaaaatttagtcagtaataaaacaatctctca

SEQ ID NO: 107959 - DNA, 80 bp, synthetic construct; identical to SEQ ID NO: 21003
  source 1..80: mol_type = other DNA

SEQ ID NO: 107960 - DNA, 80 bp, synthetic construct
  source 1..80: mol_type = other DNA
agattgaaggacaacccatttgaaaagtgggcaaatgaacagacatctcgcaaaagaatacatacaatcagccaacaaac

SEQ ID NO: 107961 - DNA, 80 bp, synthetic construct
  source 1..80: mol_type = other DNA
aaattggttcaattcctatggaaaacattatggagagttctcaaagaactaaattagaactaacatttgacccagtaatc

SEQ ID NO: 107962 - DNA, 80 bp, synthetic construct
  source 1..80: mol_type = other DNA
ccacagaatactatgaagccataaaaaacagtaaaatcatgtattttgcagcaacatggatggagttgaagcccatcatc

SEQ ID NO: 107963 - DNA, 80 bp, synthetic construct; identical to SEQ ID NO: 21004
  source 1..80: mol_type = other DNA

SEQ ID NO: 107964 - DNA, 80 bp, synthetic construct
  source 1..80: mol_type = other DNA
tttgataaataaatttagtaaagttgcagaatacaaaatcaacataaaaatgagtagcatttccatacaccaataatgaa

SEQ ID NO: 107965 - DNA, 80 bp, synthetic construct
  source 1..80: mol_type = other DNA
aaagaaattgacgagaacacaaacaaaagacatgacttgctcatggctgtaaaagttggaggacctggtccctgctagac

SEQ ID NO: 107966 - DNA, 80 bp, synthetic construct
  source 1..80: mol_type = other DNA
ttaaagagaaacaaatgactgaaaaaaaagtctgagccccaaaacccactcctaccaccaccactagcaaaatatacata

SEQ ID NO: 107967 - DNA, 80 bp, synthetic construct; identical to SEQ ID NO: 21005
  source 1..80: mol_type = other DNA

SEQ ID NO: 107968 - DNA, 80 bp, synthetic construct
  source 1..80: mol_type = other DNA
ctttctgtggcacattctaaaatattttggccttgaatattctctacctgacagtttcacccgaaatgtgcttacttccc

SEQ ID NO: 107969 - DNA, 80 bp, synthetic construct
  source 1..80: mol_type = other DNA
tggctgtaggggaatggtgtggaatagggcagcttccaagggcctttccttttatctatacattttgtccttgccatcag

SEQ ID NO: 107970 - DNA, 80 bp, synthetic construct
  source 1..80: mol_type = other DNA
tctctatccaatgctgtagccactgactacatggggatttgggaaattgaaatgtgactagcacaagataaaatgtagtg

SEQ ID NO: 107971 - DNA, 80 bp, synthetic construct
  source 1..80: mol_type = other DNA
cttttaatgtgtcaactagaaaattaaaataacatattaaaattaaaattacacatatgaaattaaaattacatatatgt

SEQ ID NO: 107972 - DNA, 80 bp, synthetic construct; identical to SEQ ID NO: 21006
  source 1..80: mol_type = other DNA

SEQ ID NO: 107973 - DNA, 80 bp, synthetic construct
  source 1..80: mol_type = other DNA
actagaaaacagcagcaaaagcatcactgttcgaccatatgtggtctttaacaaatttctagtgattgacagttaaaggc

SEQ ID NO: 107974 - DNA, 80 bp, synthetic construct
  source 1..80: mol_type = other DNA
agtaacaataaaagctaataaattcctgtcagaggattcagtttagaataaactatactgaacacttcaaaaataaaaat

SEQ ID NO: 107975 - DNA, 80 bp, synthetic construct
  source 1..80: mol_type = other DNA
gtggactttataaaaatatctaattattttgtttcttgcttattatttaagaatcaatgaagaaatacagtcatctgttg

SEQ ID NO: 107976 - DNA, 80 bp, synthetic construct; identical to SEQ ID NO: 21007
  source 1..80: mol_type = other DNA

SEQ ID NO: 107977 - DNA, 80 bp, synthetic construct
  source 1..80: mol_type = other DNA
taacagctaaatattttctttaaaattccaagactttataaaatatatcatttagaattatttttctttcaaagatagat

SEQ ID NO: 107978 - DNA, 80 bp, synthetic construct
  source 1..80: mol_type = other DNA
aaattattgtcccaaacactagagcagacattctaatttcttgaaaaagactagtaacagttccattctaacattagtct

SEQ ID NO: 107979 - DNA, 80 bp, synthetic construct
  source 1..80: mol_type = other DNA
attcctattaaaaaacattttcagcttggatacatgttttcagtattgttagagtactatgcttcatgcataaaattatg

SEQ ID NO: 107980 - DNA, 80 bp, synthetic construct
  source 1..80: mol_type = other DNA
ctctgagttggacttgtgctttcgtacataatcatttttctccactgttttcccaagatgaagactttaaaacgatagat

SEQ ID NO: 107981 - DNA, 80 bp, synthetic construct; identical to SEQ ID NO: 21008
  source 1..80: mol_type = other DNA

SEQ ID NO: 107982 - DNA, 80 bp, synthetic construct
  source 1..80: mol_type = other DNA
caataggaaaaggtataaccatacattttctaattaatttatttttttctcatccttctggctgattatctcaaaggata

SEQ ID NO: 107983 - DNA, 80 bp, synthetic construct
  source 1..80: mol_type = other DNA
agtcatttcagggatacacatttcagtgagcagtaaaagggagtcagtgaaaaacaaagctttttctctccctactagag

SEQ ID NO: 107984 - DNA, 80 bp, synthetic construct; identical to SEQ ID NO: 21009
  source 1..80: mol_type = other DNA

SEQ ID NO: 107985 - DNA, 80 bp, synthetic construct
  source 1..80: mol_type = other DNA
attgataatttttcttctgatgtgtaacagaatatttgttcatgttaatgttgctaatagttctgatttcttcatgtttt

SEQ ID NO: 107986 - DNA, 80 bp, synthetic construct
  source 1..80: mol_type = other DNA
tagttacgtaattcaagattaccttttgtcacattgtgtaattgaagactttcttttcttgttgagactgttaataagga

SEQ ID NO: 107987 - DNA, 80 bp, synthetic construct
  source 1..80: mol_type = other DNA
agacattgttttataaacagaggtataacatgaatgtaggaacaaaattaactagaatgtatgaaaaatgggtcattctg

SEQ ID NO: 107988 - DNA, 80 bp, synthetic construct; identical to SEQ ID NO: 21010
  source 1..80: mol_type = other DNA

SEQ ID NO: 107989 - DNA, 80 bp, synthetic construct
  source 1..80: mol_type = other DNA
ttagcttcagggctttgcattctattttttattcttttaaaaaattacctttttcttctctaagatgcttcatgtctgct

SEQ ID NO: 107990 - DNA, 80 bp, synthetic construct
  source 1..80: mol_type = other DNA
aggtatttttcctaatgctatccctccccttaacccccaccctcagagaggccccaatgtgtgatgttcccatccctgtg

SEQ ID NO: 107991 - DNA, 80 bp, synthetic construct
  source 1..80: mol_type = other DNA
tggtgtatatgtgccacattttctttatgcagtctatcattgatgggcatgtgggttggttccaagtctcagtcacatgc

SEQ ID NO: 107992 - DNA, 80 bp, synthetic construct; identical to SEQ ID NO: 21011
  source 1..80: mol_type = other DNA

SEQ ID NO: 107993 - DNA, 80 bp, synthetic construct
  source 1..80: mol_type = other DNA
tctgatgatagttccttttgctgtgcagaagctctttactttaattagatcccatttgtcaatcttggcttttgctgcaa

SEQ ID NO: 107994 - DNA, 80 bp, synthetic construct
  source 1..80: mol_type = other DNA
gcaccaagctagagtgcagtggcatgatcttggctcactgcaacctctgcctctcaggttcaagtgattctcctgcctca

SEQ ID NO: 107995 - DNA, 80 bp, synthetic construct; identical to SEQ ID NO: 21012
  source 1..80: mol_type = other DNA

SEQ ID NO: 107996 - DNA, 80 bp, synthetic construct
  source 1..80: mol_type = other DNA
tatatttctgttttggtaccagtaccatgctgttttggttactgtagctttgtagtatagtttggagtcaggtagtgtga

SEQ ID NO: 107997 - DNA, 80 bp, synthetic construct
  source 1..80: mol_type = other DNA
tcacaatattgattcttcctgtccatgagcatggaaggttttccatttgtttgtgtcctcttttatttccttgagcagtg

SEQ ID NO: 107998 - DNA, 80 bp, synthetic construct
  source 1..80: mol_type = other DNA
gattttgtatcttgagactttgctgaagttacttaccagctcaaggagttttggggctgtgacgatggggttttctaaat

SEQ ID NO: 107999 - DNA, 80 bp, synthetic construct
  source 1..80: mol_type = other DNA
caaagggaatgcttccagcttttgcactttcagtatgctattgactgtgggtttatcataaaaagctcttcttattttga

SEQ ID NO: 108000 - DNA, 80 bp, synthetic construct; identical to SEQ ID NO: 21013
  source 1..80: mol_type = other DNA

SEQ ID NO: 108001 - DNA, 80 bp, synthetic construct
  source 1..80: mol_type = other DNA
ttagggaggattccctctttttgtattgtttggagtcattttagaaggaatggtaccagctcctctttgtacctctggta

SEQ ID NO: 108002 - DNA, 80 bp, synthetic construct
  source 1..80: mol_type = other DNA
gtcttgggagggtgtgtgtatccagaaatttatccatttcttctagattttctagtttatttacatagaggtgtttatag

SEQ ID NO: 108003 - DNA, 80 bp, synthetic construct
  source 1..80: mol_type = other DNA
cactgatttttttaagggtttttttgtgtctctcactccttcagttctgctctgatcttagttatttcttgtcttctgct

SEQ ID NO: 108004 - DNA, 80 bp, synthetic construct; identical to SEQ ID NO: 21014
  source 1..80: mol_type = other DNA

SEQ ID NO: 108005 - DNA, 80 bp, synthetic construct
  source 1..80: mol_type = other DNA
ttttgtggctaatttgatgtatatgtcttaaaatgtcatttttacctttactttctttttcagatatttcagttttcttc

SEQ ID NO: 108006 - DNA, 80 bp, synthetic construct
  source 1..80: mol_type = other DNA
atgtagtcacctatagggtcaaaatttctcctcctcctcctctttggcctcctcttcctcctctaagtcttttactcctc

SEQ ID NO: 108007 - DNA, 80 bp, synthetic construct
  source 1..80: mol_type = other DNA
gagtagcctggtttacttacaggcatgaccctgctacccacttcctccccttttcttttatgctttgaagacaagctagg

SEQ ID NO: 108008 - DNA, 80 bp, synthetic construct
  source 1..80: mol_type = other DNA
caaaatgtggatccagttttcaaagcagtcttggtaaataataattttcttgctacactttttagacaaaagtgagaaga

SEQ ID NO: 108009 - DNA, 80 bp, synthetic construct; identical to SEQ ID NO: 21015
  source 1..80: mol_type = other DNA

SEQ ID NO: 108010 - DNA, 80 bp, synthetic construct
  source 1..80: mol_type = other DNA
atagttttttattcagtagcaaacaattgaaacttatcttctgatatttcttcctaaattacaataggcacacatactca

SEQ ID NO: 108011 - DNA, 80 bp, synthetic construct
  source 1..80: mol_type = other DNA
caggctgattacagttatcattaatttagtgtgtgcattttaaaataactaaaatattagaatttttataacacaaaaaa

SEQ ID NO: 108012 - DNA, 80 bp, synthetic construct
  source 1..80: mol_type = other DNA
taaattcaaaattggttttcttagttacaaattataaatctgttacatttttaatcttcattgatgcatgcaaacattca

SEQ ID NO: 108013 - DNA, 80 bp, synthetic construct; identical to SEQ ID NO: 21016
  source 1..80: mol_type = other DNA

SEQ ID NO: 108014 - DNA, 80 bp, synthetic construct
  source 1..80: mol_type = other DNA
agtagctattttcaaaattcaaaaaaaaattaaaatattttatgacaatgaaggtatacaataaataatgtttcataaaa

SEQ ID NO: 108015 - DNA, 80 bp, synthetic construct
  source 1..80: mol_type = other DNA
tggcattgaatccattatgaagtagcctgtagctgcattattaacgaatctgtcatgtgctgttaagaaaacaggttagt

SEQ ID NO: 108016 - DNA, 80 bp, synthetic construct
  source 1..80: mol_type = other DNA
attgttgcatatttactattgtttaagatgtccaggaaagccccgtgattttgaattacaaaataaaatgtacctcaggg

SEQ ID NO: 108017 - DNA, 80 bp, synthetic construct
  source 1..80: mol_type = other DNA
aagagagagacacaattactgtgtcttttgtttttgttttgttttggttttcttttgttgttgtttgtttgtttatttgc

SEQ ID NO: 108018 - DNA, 80 bp, synthetic construct; identical to SEQ ID NO: 21017
  source 1..80: mol_type = other DNA

SEQ ID NO: 108019 - DNA, 80 bp, synthetic construct
  source 1..80: mol_type = other DNA
gtgttccacacaccacacccatataaggtggtaaaacttaatgaatgtgtgtattgagactctcattcaccaagccctct

SEQ ID NO: 108020 - DNA, 80 bp, synthetic construct
  source 1..80: mol_type = other DNA
ccctttcctctagtcctatttcctgagactcgatggttttgaaattagaccagttagtaacctaaaatggcctcttagta

SEQ ID NO: 108021 - DNA, 80 bp, synthetic construct
  source 1..80: mol_type = other DNA
aaggaaattaaaagtgttactccagtgaccacataaatgctaagaaagggaaacagccttattgctgagacaaagaaaga

SEQ ID NO: 108022 - DNA, 80 bp, synthetic construct; identical to SEQ ID NO: 21018
  source 1..80: mol_type = other DNA

SEQ ID NO: 108023 - DNA, 80 bp, synthetic construct
  source 1..80: mol_type = other DNA
cttctattaaaagaagacgtcatctagaactttcatagctagagagaaaagtcaatatctggcttcaaagcttcaaaaga

SEQ ID NO: 108024 - DNA, 80 bp, synthetic construct
  source 1..80: mol_type = other DNA
ctgtctgcagcatgatttactgactgttttaagcccactgttgagacctactgctaagaaaaaagactcctttcaaatat

SEQ ID NO: 108025 - DNA, 80 bp, synthetic construct; identical to SEQ ID NO: 21019
  source 1..80: mol_type = other DNA

SEQ ID NO: 108026 - DNA, 80 bp, synthetic construct
  source 1..80: mol_type = other DNA
caacaaaagaattagaagtggtggctgaattgcttcaatgtcatgatcaaacttgaacagacgaggagttatttctcatg

SEQ ID NO: 108027 - DNA, 80 bp, synthetic construct
  source 1..80: mol_type = other DNA
ctactgcgagtaaaatgctgtcaaatagccatacgaactacagagaaatcttttgtcagtcaatcaatgtaccaaacttt

SEQ ID NO: 108028 - DNA, 80 bp, synthetic construct
  source 1..80: mol_type = other DNA
ttcagaaaccaccaccttcatcagttagcacccatcaacatcgagacaatacttttaccagcaaaagtattacaacttgc

SEQ ID NO: 108029 - DNA, 80 bp, synthetic construct; identical to SEQ ID NO: 21020
  source 1..80: mol_type = other DNA

SEQ ID NO: 108030 - DNA, 80 bp, synthetic construct
  source 1..80: mol_type = other DNA
aaggtatgcctgtgcacacaatatcctttgtcaaccagactcacttatatggtaatagtataatggctattacattaaca

SEQ ID NO: 108031 - DNA, 80 bp, synthetic construct
  source 1..80: mol_type = other DNA
ttttctatctatgggtgacatatcagccctttatatttcctatttttgctttttattgtaaaaataagactaaacttata

SEQ ID NO: 108032 - DNA, 80 bp, synthetic construct
  source 1..80: mol_type = other DNA
tcacaaaaatctgaacttcttactgtttctgaaatagcataaaatatatattctgccacagtccttttggaatacatatt

SEQ ID NO: 108033 - DNA, 80 bp, synthetic construct; identical to SEQ ID NO: 21021
  source 1..80: mol_type = other DNA

SEQ ID NO: 108034 - DNA, 80 bp, synthetic construct
  source 1..80: mol_type = other DNA
tatatatcatatgtattatatattatatatattataatatgtattatatattatatatattataatatgtattatatatt

SEQ ID NO: 108035 - DNA, 80 bp, synthetic construct
  source 1..80: mol_type = other DNA
tattatatataatatatatattatgatatgtattatatataatatatatattatgatatgtattatatataatatataga

SEQ ID NO: 108036 - DNA, 80 bp, synthetic construct
  source 1..80: mol_type = other DNA
tattatatataatatatatattataatatgtattatatataatatatattataatatgtattatattataataatatgta

SEQ ID NO: 108037 - DNA, 80 bp, synthetic construct
  source 1..80: mol_type = other DNA
ggtagatagataatgctagaaggatactttaagaaataacagtgatttgggaggccgaggtgggtggatcacgaggtcag

SEQ ID NO: 108038 - DNA, 80 bp, synthetic construct; identical to SEQ ID NO: 21022
  source 1..80: mol_type = other DNA

SEQ ID NO: 108039 - DNA, 80 bp, synthetic construct
  source 1..80: mol_type = other DNA
ggggtaacttctcttttaagaggatatatcaagctgaaattcacaatttgtgaaatttaacctgtgtaatttgacaagat

SEQ ID NO: 108040 - DNA, 80 bp, synthetic construct
  source 1..80: mol_type = other DNA
acaacaatattgcccttaggtcagataaactagattacactacaaaaccacaggacaacacattaccaggaaacacagtg

SEQ ID NO: 108041 - DNA, 80 bp, synthetic construct; identical to SEQ ID NO: 21023
  source 1..80: mol_type = other DNA

SEQ ID NO: 108042 - DNA, 80 bp, synthetic construct
  source 1..80: mol_type = other DNA
cagtattagggttttatccctttgggggctgtgttgtataagaggatagaatatggcaaaaaggagaataagaatattgt

SEQ ID NO: 108043 - DNA, 80 bp, synthetic construct
  source 1..80: mol_type = other DNA
ttaaactaaatctgctgtattccagagagtgccacattttgtatttttattgacctgtaccaccctccctttccaggttt

SEQ ID NO: 108044 - DNA, 80 bp, synthetic construct
  source 1..80: mol_type = other DNA
accatatatgtgggatatcttgaatgggattgagaatatctgtcaattgagtaggactctggaacagaccaagtgttacc

SEQ ID NO: 108045 - DNA, 80 bp, synthetic construct
  source 1..80: mol_type = other DNA
catcagactaaacagatattcgtacattaggaactgatagcattcaagaataaacttccatgaactgaatttgcataaat

SEQ ID NO: 108046 - DNA, 80 bp, synthetic construct; identical to SEQ ID NO: 21024
  source 1..80: mol_type = other DNA

SEQ ID NO: 108047 - DNA, 80 bp, synthetic construct
  source 1..80: mol_type = other DNA
atgccttcctgagtccaaaagtcatctttaaactcttcatcactatactctctgtgtcacacctgtacagtgaaatgaag

SEQ ID NO: 108048 - DNA, 80 bp, synthetic construct
  source 1..80: mol_type = other DNA
gacaattgtatatcatttcattttctgttattcattacgtatgtttaaaagatttccaacctaccttaacttactgtgag

SEQ ID NO: 108049 - DNA, 80 bp, synthetic construct
  source 1..80: mol_type = other DNA
attaatcattaattggtagattgatttaacaagaatgttaaatcaatgccatagcaataacattaatttatcactaacaa

SEQ ID NO: 108050 - DNA, 80 bp, synthetic construct; identical to SEQ ID NO: 21025
  source 1..80: mol_type = other DNA

SEQ ID NO: 108051 - DNA, 80 bp, synthetic construct
  source 1..80: mol_type = other DNA
tgagtcacaaatacattgagctagcttcttcataattcccaaacatccatacaactgaatgagatactcaggtggccata

SEQ ID NO: 108052 - DNA, 80 bp, synthetic construct
  source 1..80: mol_type = other DNA
attataaacttaggcagtggtcggaagaaagtataatggtcatatgaagtaatgtgaaaacggccttatgagatttcttt

SEQ ID NO: 108053 - DNA, 80 bp, synthetic construct
  source 1..80: mol_type = other DNA
aagagatgggattctcttaatggctgaggtgggtaggatttctgtcttggaatcaaacagaggaagttcagtgactcaga

SEQ ID NO: 108054 - DNA, 80 bp, synthetic construct; identical to SEQ ID NO: 21026
  source 1..80: mol_type = other DNA

SEQ ID NO: 108055 - DNA, 80 bp, synthetic construct
  source 1..80: mol_type = other DNA
tagctcaatcacacttaaagttatgctactctagctattattttttaacaaaaattatattgaacatatttttagttatt

SEQ ID NO: 108056 - DNA, 80 bp, synthetic construct
  source 1..80: mol_type = other DNA
ctgttttttctattgtgacagcttttacctgcttgagaactttttcttctgtgataggaaaaaatgttaacacaagtagg

SEQ ID NO: 108057 - DNA, 80 bp, synthetic construct
  source 1..80: mol_type = other DNA
tttgcagctatcttgctatagaagttttcctaacttaaattgttccctaacatgccaatatgagccctattttttgcctt

SEQ ID NO: 108058 - DNA, 80 bp, synthetic construct
  source 1..80: mol_type = other DNA
agtgtgaagctggggaagaacaaagttgatgcctttgtgggatgtcctttgttctcagtgatttttcatagtcaaagatg

SEQ ID NO: 108059 - DNA, 80 bp, synthetic construct; identical to SEQ ID NO: 21027
  source 1..80: mol_type = other DNA

SEQ ID NO: 108060 - DNA, 80 bp, synthetic construct
  source 1..80: mol_type = other DNA
ttgtcaatacagacagctcttctcacctctccacactccagccctgctttccttattcctatattttctgttgttggtgt

SEQ ID NO: 108061 - DNA, 80 bp, synthetic construct
  source 1..80: mol_type = other DNA
atattcacaaattgggtacatatttcagcctggaatgaaaaataatattctacagaataatcagggcttgggtagcctca

SEQ ID NO: 108062 - DNA, 80 bp, synthetic construct
  source 1..80: mol_type = other DNA
aagaaaataagaaagggaaggaagggtgaagaaaataaagagtcaggaaaagaagcatggagaaatgttgatttcttcag

SEQ ID NO: 108063 - DNA, 80 bp, synthetic construct; identical to SEQ ID NO: 21028
  source 1..80: mol_type = other DNA

SEQ ID NO: 108064 - DNA, 80 bp, synthetic construct
  source 1..80: mol_type = other DNA
actacaaataccacctgcaaaatacctggtttaccatgagaaacagtcttttctggtttcactatgtcttgttctgaaaa

SEQ ID NO: 108065 - DNA, 80 bp, synthetic construct
  source 1..80: mol_type = other DNA
aattcttatttacaaaatttttgaaactatagttttcaaaacacaggctgtaataaaacataaatataaaagcacaggtt

SEQ ID NO: 108066 - DNA, 80 bp, synthetic construct
  source 1..80: mol_type = other DNA
caataacaaatacaactggttattgtaaatagaactaggcataactagctttaaatagtactgggtttctggttaaagaa

SEQ ID NO: 108067 - DNA, 80 bp, synthetic construct; identical to SEQ ID NO: 21029
  source 1..80: mol_type = other DNA

SEQ ID NO: 108068 - DNA, 80 bp, synthetic construct
  source 1..80: mol_type = other DNA
gtcaatgctaccttctaataaaatgatagcattttagggacaatctcttaatgggggtacccagggtttggtgcaaatca

SEQ ID NO: 108069 - DNA, 80 bp, synthetic construct
  source 1..80: mol_type = other DNA
aatcctatgctagtccttagctcacaatagatgcttaataaattcttgctctcattcccttcaaaccacaatagtctata

SEQ ID NO: 108070 - DNA, 80 bp, synthetic construct; identical to SEQ ID NO: 21030
  source 1..80: mol_type = other DNA

SEQ ID NO: 108071 - DNA, 80 bp, synthetic construct
  source 1..80: mol_type = other DNA
tataaaataaagctcatgttacctggttttgcttcttttttaatttggggctctgagggagagaaaaggcagaaaattta

SEQ ID NO: 108072 - DNA, 80 bp, synthetic construct
  source 1..80: mol_type = other DNA
tgccaatgatggactattaaacatgaaacagaaacatgctttgcacttgtctgtgaaattgttgctatagctcattcttt

SEQ ID NO: 108073 - DNA, 80 bp, synthetic construct
  source 1..80: mol_type = other DNA
tgggtacttacgtgatttaggaattgagacaaataatgttatggctcaaatgtgttctcccaaacaatctgttgagtcct

SEQ ID NO: 108074 - DNA, 80 bp, synthetic construct; identical to SEQ ID NO: 21031
  source 1..80: mol_type = other DNA

SEQ ID NO: 108075 - DNA, 80 bp, synthetic construct
  source 1..80: mol_type = other DNA
aagctaggagaagcaaacaaatattctcctctacggttttaaaaagaagtgttgctttgtcaacaccttgattttggact

SEQ ID NO: 108076 - DNA, 80 bp, synthetic construct
  source 1..80: mol_type = other DNA
tgggtaatgggtagagtctagaataattttgagacacttaatatagaaagcctagattgctttgaagagattattggcag

SEQ ID NO: 108077 - DNA, 80 bp, synthetic construct
  source 1..80: mol_type = other DNA
tgtatttcttatacttctagagaccgtgaagtttgggattaaggtattagcaggtttggtctctggtttggagataatgc

SEQ ID NO: 108078 - DNA, 80 bp, synthetic construct
  source 1..80: mol_type = other DNA
aaggctccagctgtcaatactatttattacacaggtaacacataaattttgagaaaacacattcaaatcatatagatata

SEQ ID NO: 108079 - DNA, 80 bp, synthetic construct
  source 1..80: mol_type = other DNA
ttggccactaaaggaaaggtaatattttttataaagtggcaaaaaacttagcttaattgtgttcttctgttaggtggaag

SEQ ID NO: 108080 - DNA, 80 bp, synthetic construct; identical to SEQ ID NO: 21032
  source 1..80: mol_type = other DNA

SEQ ID NO: 108081 - DNA, 80 bp, synthetic construct
  source 1..80: mol_type = other DNA
aagcaaaaacaatgccagcctggacaaaaaagggacagagacatgataaaatgaagggataatgactccagagaaaagcc

SEQ ID NO: 108082 - DNA, 80 bp, synthetic construct
  source 1..80: mol_type = other DNA
ggatttgcttaggactcaggacctctttttattttattgcaatttcttccctttaaaaggggaatgtccatcctatacgt

SEQ ID NO: 108083 - DNA, 80 bp, synthetic construct
  source 1..80: mol_type = other DNA
tagatgaaattttggacttagaaccatgctagaatggttaggacttttagaaatgttgggatggggtgaacatattttgc

SEQ ID NO: 108084 - DNA, 80 bp, synthetic construct; identical to SEQ ID NO: 21033
  source 1..80: mol_type = other DNA

SEQ ID NO: 108085 - DNA, 80 bp, synthetic construct
  source 1..80: mol_type = other DNA
tgctggaaaacaccagaagatgcaaggaaggatttctctctacagatttcatggaaagcatgtcccttgtgacaccttca

SEQ ID NO: 108086 - DNA, 80 bp, synthetic construct
  source 1..80: mol_type = other DNA
cagaaccagacagttgagtgttcttttgaaaaagtttctactgcctactgtagccttcagaaatgttcatctgactcaga

SEQ ID NO: 108087 - DNA, 80 bp, synthetic construct; identical to SEQ ID NO: 21034
  source 1..80: mol_type = other DNA

SEQ ID NO: 108088 - DNA, 80 bp, synthetic construct
  source 1..80: mol_type = other DNA
ataaataaaatatacatacctggcttctcttccttttttccttgtagttctaaaaatatagatgaacattagtaacaatg

SEQ ID NO: 108089 - DNA, 80 bp, synthetic construct
  source 1..80: mol_type = other DNA
catattcttatgattgtggcaaactagtacgtaacaacagattcctcactattattccagtaagaaatattttgagagcc

SEQ ID NO: 108090 - DNA, 80 bp, synthetic construct
  source 1..80: mol_type = other DNA
tttttgagaaaataatggaaatctgagctgagatttttaatgacaaggtaaggaaagatgcttccagtgaataaaagata

SEQ ID NO: 108091 - DNA, 80 bp, synthetic construct; identical to SEQ ID NO: 21035
  source 1..80: mol_type = other DNA

SEQ ID NO: 108092 - DNA, 80 bp, synthetic construct
  source 1..80: mol_type = other DNA
gattggcaaactttttctgtaactgtcagatagtgtatattttcaggttttaggccatatagtctctcacaattcttcat

SEQ ID NO: 108093 - DNA, 80 bp, synthetic construct
  source 1..80: mol_type = other DNA
caaatatttgaatagtcaacacttttctctgattctgttttcttacaaatgccatctagtacctgtctgtcactgttcaa

SEQ ID NO: 108094 - DNA, 80 bp, synthetic construct
  source 1..80: mol_type = other DNA
gaccatattgatcactttccctttctttttaagttcctgttcacttggcttttgggaaaggtaaacataatatgtatgct

SEQ ID NO: 108095 - DNA, 80 bp, synthetic construct
  source 1..80: mol_type = other DNA
tattgaacatcagacaacaaagaacagtgatactttagtgatgggaaacaaatgagatgtaccctgtgattgcttccgct

SEQ ID NO: 108096 - DNA, 80 bp, synthetic construct; identical to SEQ ID NO: 21036
  source 1..80: mol_type = other DNA

SEQ ID NO: 108097 - DNA, 80 bp, synthetic construct
  source 1..80: mol_type = other DNA
ttccattccacgtaaactttatattcagtttgtcaacacacacaaaataattttctgggaattttccataattgcattga

SEQ ID NO: 108098 - DNA, 80 bp, synthetic construct
  source 1..80: mol_type = other DNA
tttttttttggctaacctctgcttaaggcctagtttagctgtctctttctcagaagcctttttctgatgcagcggaattg

SEQ ID NO: 108099 - DNA, 80 bp, synthetic construct; identical to SEQ ID NO: 21037
  source 1..80: mol_type = other DNA

SEQ ID NO: 108100 - DNA, 80 bp, synthetic construct
  source 1..80: mol_type = other DNA
ttacagttactgcatagtttctttgacttgggttgcaaatttacctctcatctttctgatattcaggcggaaaaaaaagc

SEQ ID NO: 108101 - DNA, 80 bp, synthetic construct
  source 1..80: mol_type = other DNA
aatgtaaataacagcctcagcaatatttttaccctaaatgtgtgatggcttttacagaaccccacctactgctcttaaca

SEQ ID NO: 108102 - DNA, 80 bp, synthetic construct
  source 1..80: mol_type = other DNA
atggagattctctccagtggtaggaaaggataatacatagtcatatttctttctgagaatctaacacatgtattgacaca

SEQ ID NO: 108103 - DNA, 80 bp, synthetic construct; identical to SEQ ID NO: 21038
  source 1..80: mol_type = other DNA

SEQ ID NO: 108104 - DNA, 80 bp, synthetic construct
  source 1..80: mol_type = other DNA
ttctgtctcccaaaatacatgtggaagtccagacgcccagtaccttatgaatgtgccttgtgtggaaatagagtttttgc

SEQ ID NO: 108105 - DNA, 80 bp, synthetic construct
  source 1..80: mol_type = other DNA
actggaggatgggagtgatgcatctacaggctcagcttcagaatttatatatgtatcaatagtcagaggtctacaatgaa

SEQ ID NO: 108106 - DNA, 80 bp, synthetic construct
  source 1..80: mol_type = other DNA
caacagtgatcaacagtgaaataatatcatttaataatctttctgatccacatatctgtaaatagatttaacatatttta

SEQ ID NO: 108107 - DNA, 80 bp, synthetic construct
  source 1..80: mol_type = other DNA
tgtaaaagtagaaaaaagtaaactttccaaatacaagtaacaaactgaactttcatgaatttattcacaaaattcataat

SEQ ID NO: 108108 - DNA, 80 bp, synthetic construct; identical to SEQ ID NO: 21039
  source 1..80: mol_type = other DNA

SEQ ID NO: 108109 - DNA, 80 bp, synthetic construct
  source 1..80: mol_type = other DNA
gaaatgataacaagtactctttcagaccacagtggaataaaattagaattcaattctaaaaggaaccttcaaaactataa

SEQ ID NO: 108110 - DNA, 80 bp, synthetic construct
  source 1..80: mol_type = other DNA
gccttaaatgcctacatcaaaaagtctaaaagagcacaaatagacaatctaaggtcacacctcaaggaactagacaaaca

SEQ ID NO: 108111 - DNA, 80 bp, synthetic construct
  source 1..80: mol_type = other DNA
agatccaaataagctcaattagatacaaaaatgggagatattacaactgacaccacaaaaatatggaagattattcaagg

SEQ ID NO: 108112 - DNA, 80 bp, synthetic construct
  source 1..80: mol_type = other DNA
tgaaaaaaaattccaggaattgggtggatatacccaattctttaaatgtctgatagaattctgctgtgaatatttctggt

SEQ ID NO: 108113 - DNA, 80 bp, synthetic construct; identical to SEQ ID NO: 21040
  source 1..80: mol_type = other DNA

SEQ ID NO: 108114 - DNA, 80 bp, synthetic construct
  source 1..80: mol_type = other DNA
caaaaagacaatccatcatgatcacgtgtgtttcatactagggatgcagggatggtttaacatatacaagtcaataaata

SEQ ID NO: 108115 - DNA, 80 bp, synthetic construct
  source 1..80: mol_type = other DNA
caaacccacagccagcgtaacactgaatgggaaaaagttgaaagcattccctctgaaaactagaacaggacaaggatgcc

SEQ ID NO: 108116 - DNA, 80 bp, synthetic construct
  source 1..80: mol_type = other DNA
aaaagcccctagaactgataaatgaattcagcaaagtttgaggatacaaaattaatgtacacacatcagtagctctgcta

SEQ ID NO: 108117 - DNA, 80 bp, synthetic construct; identical to SEQ ID NO: 21041
  source 1..80: mol_type = other DNA

SEQ ID NO: 108118 - DNA, 80 bp, synthetic construct
  source 1..80: mol_type = other DNA
ctggaggcatcacattacatgatttcaaactatattataaggccacagtcaccaaaacagtgtggtactggtataaaaat

SEQ ID NO: 108119 - DNA, 80 bp, synthetic construct
  source 1..80: mol_type = other DNA
actggatcctcatttcttaccttatacagaaatcaactcaagatgcatcaagggcttaaaactaagacctgaaactataa

SEQ ID NO: 108120 - DNA, 80 bp, synthetic construct
  source 1..80: mol_type = other DNA
agtaaacagacaacctacagagtgggagaaaatcttcacaatctatacatctgacaaagaaataatatccagaatctaca

SEQ ID NO: 108121 - DNA, 80 bp, synthetic construct
  source 1..80: mol_type = other DNA
accttactcctgcaagaatggccataatcaaaaaattaaaaaataatagatgttgtcatggatgcagtgaaaagagaaca

SEQ ID NO: 108122 - DNA, 80 bp, synthetic construct; identical to SEQ ID NO: 21042
  source 1..80: mol_type = other DNA

SEQ ID NO: 108123 - DNA, 80 bp, synthetic construct
  source 1..80: mol_type = other DNA
gagtgagagataagctatgaggatgcaatggcataagaatgaaacaatgcattttggggaccagtttgaaagggagggag

SEQ ID NO: 108124 - DNA, 80 bp, synthetic construct; identical to SEQ ID NO: 21043
  source 1..80: mol_type = other DNA

SEQ ID NO: 108125 - DNA, 80 bp, synthetic construct
  source 1..80: mol_type = other DNA
aatttgtcacttaacatccttctcaaatgatcctgatggccacttagatgtacaaattattgctctgaagggataaaatc

SEQ ID NO: 108126 - DNA, 80 bp, synthetic construct
  source 1..80: mol_type = other DNA
gtatattcagttaagatactggacccatttcaaatctgaagacatttcacagttaagcacatatccaaatatattaatga

SEQ ID NO: 108127 - DNA, 80 bp, synthetic construct
  source 1..80: mol_type = other DNA
aatgtaaatttaatcttccaggtgtacctgatgcatgttgaaatttgagaaccactgtttgataaccgtagttgcttttt

SEQ ID NO: 108128 - DNA, 80 bp, synthetic construct; identical to SEQ ID NO: 21044
  source 1..80: mol_type = other DNA

SEQ ID NO: 108129 - DNA, 80 bp, synthetic construct
  source 1..80: mol_type = other DNA
caaatagtgagtagcaatataagagtagacacacacacccatatatgtttattgtaatgatagggactttagccttattt

SEQ ID NO: 108130 - DNA, 80 bp, synthetic construct
  source 1..80: mol_type = other DNA
ttaaaaaggaaaaatcaagtgttccaaaaacacacaataggaaaagaacaatctctttaataaacagtgccaggaaaact

SEQ ID NO: 108131 - DNA, 80 bp, synthetic construct
  source 1..80: mol_type = other DNA
gtaggactccaaaagtacaggcaacaaaatcaaaaataaactaatgggattgagtgaaactaaaaagcctctgcacagca

SEQ ID NO: 108132 - DNA, 80 bp, synthetic construct
  source 1..80: mol_type = other DNA
gacacttctcaaaagaaaatatatgaaaggccaacagatatgtgaaaagatgtttgacatttctaatcatgtgggaaata

SEQ ID NO: 108133 - DNA, 80 bp, synthetic construct; identical to SEQ ID NO: 21045
  source 1..80: mol_type = other DNA

SEQ ID NO: 108134 - DNA, 80 bp, synthetic construct
  source 1..80: mol_type = other DNA
tatatagtatgtatgtatagtgtatatatatatacactatatatagtatgtatgtatagtgtatatatataaaatatgtt

SEQ ID NO: 108135 - DNA, 80 bp, synthetic construct
  source 1..80: mol_type = other DNA
ggaaggtggttaccagagggtagagaatagagggagagatgggaaaagcgatgatgctgataaaagggtgcaaagtttca

SEQ ID NO: 108136 - DNA, 80 bp, synthetic construct; identical to SEQ ID NO: 21046
  source 1..80: mol_type = other DNA

SEQ ID NO: 108137 - DNA, 80 bp, synthetic construct
  source 1..80: mol_type = other DNA
aatgtcctagtgattacaacccctttcatagaaatgtctgcataatcttcaccttaatcttcatgcaattgaaagtgggt

SEQ ID NO: 108138 - DNA, 80 bp, synthetic construct
  source 1..80: mol_type = other DNA
tgcctgctatgagcaagagggccattgacaataagaatgttttgactatccctggtgagagacagaaaaaaagttctcca

SEQ ID NO: 108139 - DNA, 80 bp, synthetic construct
  source 1..80: mol_type = other DNA
ggtgagctctctggtgccttagggactccgggatagtcccttgagtaatgcagttcactccttcccttctttatttgatg

SEQ ID NO: 108140 - DNA, 80 bp, synthetic construct; identical to SEQ ID NO: 21047
  source 1..80: mol_type = other DNA

SEQ ID NO: 108141 - DNA, 80 bp, synthetic construct
  source 1..80: mol_type = other DNA
tggctttaaaatggttaaaatggctttaaatggtgacatgttttgcatggtatcttgtttcttagaagtggtctagataa

SEQ ID NO: 108142 - DNA, 80 bp, synthetic construct
  source 1..80: mol_type = other DNA
aatcctcacctatagaatgtcaatgtctgctgggcagttcaggatttcttcctttctaggtttatataaaatgtgccaaa

SEQ ID NO: 108143 - DNA, 80 bp, synthetic construct
  source 1..80: mol_type = other DNA
gtaatctcagcactttggtaggctgaggcaggcagatcacttaaggtcaggagttggagaccagcctggccaacatggtg

SEQ ID NO: 108144 - DNA, 80 bp, synthetic construct; identical to SEQ ID NO: 21048
  source 1..80: mol_type = other DNA

SEQ ID NO: 108145 - DNA, 80 bp, synthetic construct
  source 1..80: mol_type = other DNA
acggtgaaaccctgtctctactaaaaaatacaaaaaattagcctggagtggtggcgggcacctgtagtcccagctaatca

SEQ ID NO: 108146 - DNA, 80 bp, synthetic construct
  source 1..80: mol_type = other DNA
atagtctgtgtaatttgtgataagattcataaatggggaatttataaagggaactttgtgtaaaattaaaaacttgctat

SEQ ID NO: 108147 - DNA, 80 bp, synthetic construct
  source 1..80: mol_type = other DNA
ttcagcttttttgtcagctcctgttaatttttctcctctgtttatgactgctgttgtggtctgatggtaaagtgttttgt

SEQ ID NO: 108148 - DNA, 80 bp, synthetic construct; identical to SEQ ID NO: 21049
  source 1..80: mol_type = other DNA

SEQ ID NO: 108149 - DNA, 80 bp, synthetic construct
  source 1..80: mol_type = other DNA
ggcccttgaacccctttttagcagtgtgggagccagagactaggagccaggaaatgtatttataaaaattacttgtctgt

SEQ ID NO: 108150 - DNA, 80 bp, synthetic construct
  source 1..80: mol_type = other DNA
gacttacttttgctaaaacttggaaagaagaatcccctgaagatcaactacaaccaaaatggaagggcccttatcaggtg

SEQ ID NO: 108151 - DNA, 80 bp, synthetic construct
  source 1..80: mol_type = other DNA
tctcagccagaagtagtaacatgatgctgtgggtgggaatgggagctacagtttttctcttcttcctgattgtaatactt

SEQ ID NO: 108152 - DNA, 80 bp, synthetic construct; identical to SEQ ID NO: 21050
  source 1..80: mol_type = other DNA

SEQ ID NO: 108153 - DNA, 80 bp, synthetic construct
  source 1..80: mol_type = other DNA
actaaccatagtgatgctgaaatattcaaacccctgcttggtaaatagaactctccccacttaacggattatacctgaat

SEQ ID NO: 108154 - DNA, 80 bp, synthetic construct
  source 1..80: mol_type = other DNA
ttctttgattcaactacagttggcaagttcccaaggctgcagtaaagtaaatgggattccacttgtaagttaggagacca

SEQ ID NO: 108155 - DNA, 80 bp, synthetic construct
  source 1..80: mol_type = other DNA
gaaaaaatatctctatagacacaacttggaagcaaaggataaacatcacaccctgtagggcttctgtttgtgccccctct

SEQ ID NO: 108156 - DNA, 80 bp, synthetic construct; identical to SEQ ID NO: 21051
  source 1..80: mol_type = other DNA

SEQ ID NO: 108157 - DNA, 80 bp, synthetic construct
  source 1..80: mol_type = other DNA
aagtgtccttagaccatttggcaaatgtagtttttgataatagactagtgttggattatttaccggctgaacacagtgga

SEQ ID NO: 108158 - DNA, 80 bp, synthetic construct
  source 1..80: mol_type = other DNA
caagtcttacctggtttttacctctcctaggaacttggttgctatcttgttactaatattggcccttgcttatttaacct

SEQ ID NO: 108159 - DNA, 80 bp, synthetic construct
  source 1..80: mol_type = other DNA
gattctcataatgagcatgcaacgtagatcccttgcacacgcagttaacaatagggtttgcactcatatgagatttaatg

SEQ ID NO: 108160 - DNA, 80 bp, synthetic construct
  source 1..80: mol_type = other DNA
gttgggaatccctgttttggggacccctgttttagattaccacgattttaccaagtaaaaacagtgctggcacaaggctt

SEQ ID NO: 108161 - DNA, 80 bp, synthetic construct; identical to SEQ ID NO: 21052
  source 1..80: mol_type = other DNA

SEQ ID NO: 108162 - DNA, 80 bp, synthetic construct
  source 1..80: mol_type = other DNA
ggagttactgcccccttccatgtgactcagtgatgactactcctcccctagaaatgtctgcatagactgctccttaatat

SEQ ID NO: 108163 - DNA, 80 bp, synthetic construct
  source 1..80: mol_type = other DNA
ctgcaggagcagtcacagagcttaacatccccagagctgtaatgctgcctcttcaataaggctatttttatgtacctttg

SEQ ID NO: 108164 - DNA, 80 bp, synthetic construct; identical to SEQ ID NO: 21053
  source 1..80: mol_type = other DNA

SEQ ID NO: 108165 - DNA, 80 bp, synthetic construct
  source 1..80: mol_type = other DNA
gccaagtgtagtggcatatgcctataatcccagctactcaggagactgaaacacgagaatcgcttgaacccaggaggtgg

SEQ ID NO: 108166 - DNA, 80 bp, synthetic construct
  source 1..80: mol_type = other DNA
tgcagttcagataaaaatcaacctgaaatgttgcagcattattttctcctgggtttactgctctttaagacatctattta

SEQ ID NO: 108167 - DNA, 80 bp, synthetic construct
  source 1..80: mol_type = other DNA
tacttagaacagagcagaggttgactttgctgtagatatacatcttagccagaaagaaccatccgacaggcattttacca

SEQ ID NO: 108168 - DNA, 80 bp, synthetic construct; identical to SEQ ID NO: 21054
  source 1..80: mol_type = other DNA

SEQ ID NO: 108169 - DNA, 80 bp, synthetic construct
  source 1..80: mol_type = other DNA
tataagactctaagagaaaatgccttctgagctgtgtatgaattagagttcacaaacgttcttttttcttccttacttat

SEQ ID NO: 108170 - DNA, 80 bp, synthetic construct
  source 1..80: mol_type = other DNA
agggaaagaaatggtaaatgctttgaaaatttccctttagtcttttaaaggccatttggtaaacaagaattgtctctgac

SEQ ID NO: 108171 - DNA, 80 bp, synthetic construct
  source 1..80: mol_type = other DNA
gattatctgtaacagggtctgtggttgatatgcctttttcatcctagttggtatgcattggctatatattatgctaagtt

SEQ ID NO: 108172 - DNA, 80 bp, synthetic construct
  source 1..80: mol_type = other DNA
gaaaccctttgtgttctgcctcttgatgttcaaaggtgattaaagtgatgttgaagagactgtttagtagcaaatttttg

SEQ ID NO: 108173 - DNA, 80 bp, synthetic construct; identical to SEQ ID NO: 21055
  source 1..80: mol_type = other DNA

SEQ ID NO: 108174 - DNA, 80 bp, synthetic construct
  source 1..80: mol_type = other DNA
tccttcaaaggccatgcaaagggcgcatccattccagacatcacaaatttctcttgaaaatatggagaagaatagaatat

SEQ ID NO: 108175 - DNA, 80 bp, synthetic construct
  source 1..80: mol_type = other DNA
tcacctactcttccaaccagaaggttagaagtcttctaagattcctctccatactcacaagtgtgaataacttcatcata

SEQ ID NO: 108176 - DNA, 80 bp, synthetic construct
  source 1..80: mol_type = other DNA
tagtacataagcatggttagttaaaagaaagaaaaaccggggattgggactaggttctaataatgaaactagccatctct

SEQ ID NO: 108177 - DNA, 80 bp, synthetic construct; identical to SEQ ID NO: 21056
  source 1..80: mol_type = other DNA

SEQ ID NO: 108178 - DNA, 80 bp, synthetic construct
  source 1..80: mol_type = other DNA
gtctccccagatagagtaagaaattcactaggcaagggactgcagctatcatctttgtattcttagcacttgtgcattgt

SEQ ID NO: 108179 - DNA, 80 bp, synthetic construct
  source 1..80: mol_type = other DNA
ctgctaaaatattggggagggagttgcaaaaaagagaattactctgcagccctttactgaaacatgccattaaaggaaat

SEQ ID NO: 108180 - DNA, 80 bp, synthetic construct
  source 1..80: mol_type = other DNA
ataattacttcacctaacaaacggagaaaattatgccatgtttaggtgtgactattggatagttttggtctggaatagaa

SEQ ID NO: 108181 - DNA, 80 bp, synthetic construct; identical to SEQ ID NO: 21057
  source 1..80: mol_type = other DNA

SEQ ID NO: 108182 - DNA, 80 bp, synthetic construct
  source 1..80: mol_type = other DNA
gaaccattatttgtctcaggtttgctatttgtcacatccatatcagcacctgggcttgagaatattttgttctgaaacca

SEQ ID NO: 108183 - DNA, 80 bp, synthetic construct
  source 1..80: mol_type = other DNA
agcaagtaaaagaaaagggaagacgtcatacaggtgcccacaagaggcttctgaaacaccttcctctggaatataattta

SEQ ID NO: 108184 - DNA, 80 bp, synthetic construct
  source 1..80: mol_type = other DNA
acattgagcattaaaaatagtatataagcatagttggatgagagaatgaaaaaaggagattgagaataggttcaaataat

SEQ ID NO: 108185 - DNA, 80 bp, synthetic construct
  source 1..80: mol_type = other DNA
gtcaagtgtttaagaagcttccaagtttttcttttaatttagaagaaccacagcatctgcttcctatgtggtaagtaata

SEQ ID NO: 108186 - DNA, 80 bp, synthetic construct; identical to SEQ ID NO: 21058
  source 1..80: mol_type = other DNA

SEQ ID NO: 108187 - DNA, 80 bp, synthetic construct
  source 1..80: mol_type = other DNA
ctcttggaagaaaggatgtgtatatttcctgaggatccacagagaatgaatttctctgagattttaaatcagctgagaaa

SEQ ID NO: 108188 - DNA, 80 bp, synthetic construct
  source 1..80: mol_type = other DNA
tagttttgtaagctaaatggccaataatagtgttctattcagattttgaaagatgtagcaacatttaattctggaaagtt

SEQ ID NO: 108189 - DNA, 80 bp, synthetic construct
  source 1..80: mol_type = other DNA
tccccttttaacgaattaagaaacaggcttccaggtccattttactacataacttacatatcttattgcacttgatcatt

SEQ ID NO: 108190 - DNA, 80 bp, synthetic construct; identical to SEQ ID NO: 21059
  source 1..80: mol_type = other DNA

SEQ ID NO: 108191 - DNA, 80 bp, synthetic construct
  source 1..80: mol_type = other DNA
atctttctttcacgtccttgaaatcaagttggccatgtgagtaaggtcattgataagttgaaagaagccaggtcatctat

SEQ ID NO: 108192 - DNA, 80 bp, synthetic construct
  source 1..80: mol_type = other DNA
tccaccaatattagttatttttaaattttccaggatctggcttagtaagtactcaataaatgtccttgaactaacatggt

SEQ ID NO: 108193 - DNA, 80 bp, synthetic construct
  source 1..80: mol_type = other DNA
aaaccattttgtcagtgatagaaatactgattcaactgccaactcataaatgaaaaattcatatggcggtctgcgtgtat

SEQ ID NO: 108194 - DNA, 80 bp, synthetic construct; identical to SEQ ID NO: 21060
  source 1..80: mol_type = other DNA

SEQ ID NO: 108195 - DNA, 80 bp, synthetic construct
  source 1..80: mol_type = other DNA
atcaattagaagtttcttaagtgatatgagccaaagagactctggtgactgatgagtatcgatgcatactgtttttcttt

SEQ ID NO: 108196 - DNA, 80 bp, synthetic construct
  source 1..80: mol_type = other DNA
agtgtcagaataaagggacagttgtcttctttagtcatttttaggatgaccaaagtccagaaatcacccatcaagtgagt

SEQ ID NO: 108197 - DNA, 80 bp, synthetic construct; identical to SEQ ID NO: 21061
  source 1..80: mol_type = other DNA

SEQ ID NO: 108198 - DNA, 80 bp, synthetic construct
  source 1..80: mol_type = other DNA
aagcagctaggtgatgctgatgttgttctttggaccacactttaaatagtaactgtatagattataaccttttatatttt

SEQ ID NO: 108199 - DNA, 80 bp, synthetic construct
  source 1..80: mol_type = other DNA
agaagttaaatcatgatgtcaaatcacttagaagttaaatgatgatgtaaaccactccatatcaattgtcccagagctcc

SEQ ID NO: 108200 - DNA, 80 bp, synthetic construct
  source 1..80: mol_type = other DNA
atgatttcctttccataaagataatgttgttggacctactgtggctatagtggcttttgaaatatttttttctgccttag

SEQ ID NO: 108201 - DNA, 80 bp, synthetic construct; identical to SEQ ID NO: 21062
  source 1..80: mol_type = other DNA

SEQ ID NO: 108202 - DNA, 80 bp, synthetic construct
  source 1..80: mol_type = other DNA
aatatgttgagggcagtatgacaatgaatgacagtaacctagcactgttccctacagatgtccattttgtaaagataagt

SEQ ID NO: 108203 - DNA, 80 bp, synthetic construct
  source 1..80: mol_type = other DNA
aacttcgtgcctacttggatgctgggttctgaaacagaaagaagagttgtaaatgactcagaagtttaagccaatgtaac

SEQ ID NO: 108204 - DNA, 80 bp, synthetic construct
  source 1..80: mol_type = other DNA
ttttgtatatgaatattaattttcttttattttctttttttttttttttttttgagacggagtcttgctctgttgccaga

SEQ ID NO: 108205 - DNA, 80 bp, synthetic construct
  source 1..80: mol_type = other DNA
ggccaggatggtctggatctcctgacctcatgatccgccagcctcggcctcccaaagtgctgggattaaaggcgtgagac

SEQ ID NO: 108206 - DNA, 80 bp, synthetic construct; identical to SEQ ID NO: 21063
  source 1..80: mol_type = other DNA

SEQ ID NO: 108207 - DNA, 80 bp, synthetic construct
  source 1..80: mol_type = other DNA
agttgtgtaaacaaagataaaaacatttttcttcttatttaatttctccaaaaatttaaaaactatttgcaaatattttt

SEQ ID NO: 108208 - DNA, 80 bp, synthetic construct
  source 1..80: mol_type = other DNA
cttacaataagtaaataaaaactgtcatttcctggaaggcccaggaaccttaagacagtaagcaaattctaaagtctgcc

SEQ ID NO: 108209 - DNA, 80 bp, synthetic construct
  source 1..80: mol_type = other DNA
tcttaaattgttttaggttcctccaattcaactttcttccataaaagtggtaaaatgagaactgctctgtccttaaagcc

SEQ ID NO: 108210 - DNA, 80 bp, synthetic construct; identical to SEQ ID NO: 21064
  source 1..80: mol_type = other DNA

SEQ ID NO: 108211 - DNA, 80 bp, synthetic construct
  source 1..80: mol_type = other DNA
ttaattcaacccagtcataaactactactcagtggctataacaagtctcagcagaatatgtctagacttttagatatgtt

SEQ ID NO: 108212 - DNA, 80 bp, synthetic construct
  source 1..80: mol_type = other DNA
agttcaatacctcaagatgattgctgatgtctgcccagggacagataaaatggaatttgatgctgggatccagccaaatc

SEQ ID NO: 108213 - DNA, 80 bp, synthetic construct
  source 1..80: mol_type = other DNA
gtgatgctttcagataaggatgttgatcaaaaggggggaaatgtgaaagctgataatctaaattgggtcattcttgtcat

SEQ ID NO: 108214 - DNA, 80 bp, synthetic construct; identical to SEQ ID NO: 21065
  source 1..80: mol_type = other DNA

SEQ ID NO: 108215 - DNA, 80 bp, synthetic construct
  source 1..80: mol_type = other DNA
atgtcatgtttgccaccatttttataaaggggtaaagaaaaaaaaagaaatttagtgtccaacaatatgctatgctaaaa

SEQ ID NO: 108216 - DNA, 80 bp, synthetic construct
  source 1..80: mol_type = other DNA
aggggtcataataagcaagaaaaccatcctccggatttggcaataaatgttattggtcacctttataggagaggatttag

SEQ ID NO: 108217 - DNA, 80 bp, synthetic construct
  source 1..80: mol_type = other DNA
acagttctttcttaattaatatctctctgtgctggttccttgctcctcctcttcatggaatacttcaccctatcataaac

SEQ ID NO: 108218 - DNA, 80 bp, synthetic construct; identical to SEQ ID NO: 21066
  source 1..80: mol_type = other DNA

SEQ ID NO: 108219 - DNA, 80 bp, synthetic construct
  source 1..80: mol_type = other DNA
tctcttcactagttattttgcttttccaagaagttgttctcggttcttttcttttttcttatgctcatttttaaaaaata

SEQ ID NO: 108220 - DNA, 80 bp, synthetic construct
  source 1..80: mol_type = other DNA
ccatctctagtagtcctaagtgtctatttttgccatctttatgtccatgagtatctaatgtttagctcccagttataact

SEQ ID NO: 108221 - DNA, 80 bp, synthetic construct
  source 1..80: mol_type = other DNA
catggatgggcacctagcttgattccatgtctttgttattgtgagtagtgctgtgatgaacatatgagtgcacgtgtgtg

SEQ ID NO: 108222 - DNA, 80 bp, synthetic construct; identical to SEQ ID NO: 21067
  source 1..80: mol_type = other DNA

SEQ ID NO: 108223 - DNA, 80 bp, synthetic construct
  source 1..80: mol_type = other DNA
ttgaattccctttgcaacttctagttaatcaccttcatcttcccatgcttcagaccttgtagttatacagaactaatgtc

SEQ ID NO: 108224 - DNA, 80 bp, synthetic construct
  source 1..80: mol_type = other DNA
gagtgattttttaaaacttaaaaaatcatttactgaacattagtcatggctctaaataattttgaaagtaatcaatgtta

SEQ ID NO: 108225 - DNA, 80 bp, synthetic construct
  source 1..80: mol_type = other DNA
tgactaacaattccaccttcttctcgattatggcctcaagaatccaaatttcactttagtcttctaagcccccattcctg

SEQ ID NO: 108226 - DNA, 80 bp, synthetic construct; identical to SEQ ID NO: 21068
  source 1..80: mol_type = other DNA

SEQ ID NO: 108227 - DNA, 80 bp, synthetic construct
  source 1..80: mol_type = other DNA
aaaattcatgtatcgctagtataaagccaacactggttccatcatactttatagtaatttccttgtctcagctgctctta

SEQ ID NO: 108228 - DNA, 80 bp, synthetic construct
  source 1..80: mol_type = other DNA
atcataactgcataaaatatatgtaggtactagtctgttttgtcatttgttaccataaaatatacaaatatataaatcga

SEQ ID NO: 108229 - DNA, 80 bp, synthetic construct; identical to SEQ ID NO: 21069
  source 1..80: mol_type = other DNA

SEQ ID NO: 108230 - DNA, 80 bp, synthetic construct
  source 1..80: mol_type = other DNA
atatgaagtgccactagtgatgctgagaatgctccaaagaagcataaaaaagtcataacattaatggaaaaatttgaatt

SEQ ID NO: 108231 - DNA, 80 bp, synthetic construct
  source 1..80: mol_type = other DNA
agctataccagcaggagtgaaaaccttgtacttattgcaaaatacttttttatctcattttgataatgtagcttttatgt

SEQ ID NO: 108232 - DNA, 80 bp, synthetic construct
  source 1..80: mol_type = other DNA
atttggctttttttaaaatgtcacaacaataggagaagaaggttcagccaaccaagagaaggcagcagaaaagttctcag

SEQ ID NO: 108233 - DNA, 80 bp, synthetic construct; identical to SEQ ID NO: 21070
  source 1..80: mol_type = other DNA

SEQ ID NO: 108234 - DNA, 80 bp, synthetic construct
  source 1..80: mol_type = other DNA
tgaagggaaagcataaacaccagcttcaaatcttttgattatacaagaagacctggacaatgagaacctgtattagtctg

SEQ ID NO: 108235 - DNA, 80 bp, synthetic construct
  source 1..80: mol_type = other DNA
aagtgtgaaaaaagaactgccagacacttataaaaccatcagatcccatgagaacttactatcatgagaatagcatgggg

SEQ ID NO: 108236 - DNA, 80 bp, synthetic construct
  source 1..80: mol_type = other DNA
agtgaggaagtaccttgccagtaaacggttgacttttaacattctcttaataattgaataatgccattggccacccacaa

SEQ ID NO: 108237 - DNA, 80 bp, synthetic construct
  source 1..80: mol_type = other DNA
attctcttaataattgaataatgccattggccacccacaactctcttgagttctacacctaaggtgttgaagtggtctac

SEQ ID NO: 108238 - DNA, 80 bp, synthetic construct; identical to SEQ ID NO: 21071
  source 1..80: mol_type = other DNA

SEQ ID NO: 108239 - DNA, 80 bp, synthetic construct
  source 1..80: mol_type = other DNA
aatagaagataatttaatgaagatgagtacttctgaatgagtaccagacaaagaggtagcagatttggaagaagtagtac

SEQ ID NO: 108240 - DNA, 80 bp, synthetic construct
  source 1..80: mol_type = other DNA
aaaaagcaaaaaagttagacagaaattaccatgcattctgtaaagttatgcttctgacccatttgcatttattccgcctc

SEQ ID NO: 108241 - DNA, 80 bp, synthetic construct
  source 1..80: mol_type = other DNA
atacatataacataccaaatagttgtgcatccagtttatattaccaggaaggcttatagttaacaggaggctattagtag

SEQ ID NO: 108242 - DNA, 80 bp, synthetic construct; identical to SEQ ID NO: 21072
  source 1..80: mol_type = other DNA

SEQ ID NO: 108243 - DNA, 80 bp, synthetic construct
  source 1..80: mol_type = other DNA
aaaatgccttaatgctgatttatctttcataataggaaattaaaagcaaataccatataaaaatagacatattctttcct

SEQ ID NO: 108244 - DNA, 80 bp, synthetic construct
  source 1..80: mol_type = other DNA
cattagaatgtgctcctttagcttagtgaagatcaattttatccacattctgaagtctacttctgtcatttcagccatct

SEQ ID NO: 108245 - DNA, 80 bp, synthetic construct
  source 1..80: mol_type = other DNA
tggagatttttgtttgtttgtttgtttttgtttttcttttaaaagtctggcctcctttccatagggcttctgtagtttgc

SEQ ID NO: 108246 - DNA, 80 bp, synthetic construct; identical to SEQ ID NO: 21073
  source 1..80: mol_type = other DNA

SEQ ID NO: 108247 - DNA, 80 bp, synthetic construct
  source 1..80: mol_type = other DNA
caaagatttcatgatgaggatgccaaaagcaattgcaacaaaagcaaaaattgacaaatgggatctaattaaaccaacga

SEQ ID NO: 108248 - DNA, 80 bp, synthetic construct
  source 1..80: mol_type = other DNA
gtgggcaaaatacatgaacagacacttttcaatacaagacatacatgcagccaataagcatatgaaaaaaaggcttaata

SEQ ID NO: 108249 - DNA, 80 bp, synthetic construct
  source 1..80: mol_type = other DNA
attgtggaaaacagtgtggcgattcatcaaagaccagtgtggcataccatttaacacaacaatctcatcactaggtatat

SEQ ID NO: 108250 - DNA, 80 bp, synthetic construct; identical to SEQ ID NO: 21074
  source 1..80: mol_type = other DNA

SEQ ID NO: 108251 - DNA, 80 bp, synthetic construct
  source 1..80: mol_type = other DNA
cttaatacctgggcgatgaaataattggtacaacaaaccccatgacacatctttgcccgtgtaacaaacctgcacatcct

SEQ ID NO: 108252 - DNA, 80 bp, synthetic construct
  source 1..80: mol_type = other DNA
ggaaaggacaacataatgcaccttttatctgattagtgagttttcactactccagtaaaaatgctaacaataataaagca

SEQ ID NO: 108253 - DNA, 80 bp, synthetic construct
  source 1..80: mol_type = other DNA
tgttcaacttttcattgatcttccaaagaatgcatgttttaaaattatataaaattactttaaatgggcatgcttattca

SEQ ID NO: 108254 - DNA, 80 bp, synthetic construct
  source 1..80: mol_type = other DNA
tttagaccaacatcatgaatgtctgcttttttgtagtatcactttcactctacagagagatatagatatagatacaactt

SEQ ID NO: 108255 - DNA, 80 bp, synthetic construct; identical to SEQ ID NO: 21075
  source 1..80: mol_type = other DNA

SEQ ID NO: 108256 - DNA, 80 bp, synthetic construct
  source 1..80: mol_type = other DNA
gaaaagtgtttaatctgttaggttgaaccatgtgggactccttttttggagatcaaaatggttgaaagtaggtaaataca

SEQ ID NO: 108257 - DNA, 80 bp, synthetic construct
  source 1..80: mol_type = other DNA
aaataaacaaagagcagcgtatgtgctaatggttctagtgctttgataaacttacccaaaatctgctaccagaaagcaag

SEQ ID NO: 108258 - DNA, 80 bp, synthetic construct; identical to SEQ ID NO: 21076
  source 1..80: mol_type = other DNA

SEQ ID NO: 108259 - DNA, 80 bp, synthetic construct
  source 1..80: mol_type = other DNA
tatgtatctttggtaaattataaagtaacttaagcaaaaatactttgattttaaaatccagtttgcaaaaaagtttcatg

SEQ ID NO: 108260 - DNA, 80 bp, synthetic construct
  source 1..80: mol_type = other DNA
tttcctaatttgaccaacttaagcaattttgtctttgactaccatacatttaattcatggggctccacctagtggttaat

SEQ ID NO: 108261 - DNA, 80 bp, synthetic construct
  source 1..80: mol_type = other DNA
cctaggacaatgtcttttgtccagaaattctgcattctaaaaacaccagtatagaataaattcataccttttttaaacta

SEQ ID NO: 108262 - DNA, 80 bp, synthetic construct; identical to SEQ ID NO: 21077
  source 1..80: mol_type = other DNA

SEQ ID NO: 108263 - DNA, 80 bp, synthetic construct
  source 1..80: mol_type = other DNA
aaaaagtagtatcagtgctattaatgcactctgacactctttggcacatatttctccccctttttgacacattcacttag

SEQ ID NO: 108264 - DNA, 80 bp, synthetic construct
  source 1..80: mol_type = other DNA
gtggtatatgatcaacaaatattgttgaaggaatgaatgagtgaaataaatggaatatatagaatgactaaaggctccct

SEQ ID NO: 108265 - DNA, 80 bp, synthetic construct
  source 1..80: mol_type = other DNA
caacaattcaatgataccttcaattattgggtttcctggtgctatgttttgtctcagtcagtttaggctaaagttaattc

SEQ ID NO: 108266 - DNA, 80 bp, synthetic construct
  source 1..80: mol_type = other DNA
caaattagcacaattctagtgatgagaattattttttctggagtacttatggctcaagtgctggtcaattattgacttgc

SEQ ID NO: 108267 - DNA, 80 bp, synthetic construct; identical to SEQ ID NO: 21078
  source 1..80: mol_type = other DNA

SEQ ID NO: 108268 - DNA, 80 bp, synthetic construct
  source 1..80: mol_type = other DNA
aggacacagttcattagcattttgctcatcaataataggtatctatttgaaacagccttgcttcccactctgcacacggc

SEQ ID NO: 108269 - DNA, 80 bp, synthetic construct
  source 1..80: mol_type = other DNA
aatacaaccagaaccaacttcgatcttgtacacagaattttgtaagcactcctatgaaaaggtattatctaacgtgtggc

SEQ ID NO: 108270 - DNA, 80 bp, synthetic construct
  source 1..80: mol_type = other DNA
ctgactttaaaagcaagctcatttcctaagttttgtgaccttgggcattacttaaaacctcaagtcttcattctgtcatt

SEQ ID NO: 108271 - DNA, 80 bp, synthetic construct; identical to SEQ ID NO: 21079
  source 1..80: mol_type = other DNA

SEQ ID NO: 108272 - DNA, 80 bp, synthetic construct
  source 1..80: mol_type = other DNA
tatatatgaagcttaatgaaaagttataatgagatgcttcaggaaaccaaggacagttgttagttaatactggccattgg

SEQ ID NO: 108273 - DNA, 80 bp, synthetic construct
  source 1..80: mol_type = other DNA
ttgccactgaagcccttcgttttgggctacacgtacaagcattggggaaatatggaaccaaaaagtccccatgctaagtt

SEQ ID NO: 108274 - DNA, 80 bp, synthetic construct
  source 1..80: mol_type = other DNA
atgtcatcaatagtgttttcaagtagaataagcagaccaaaacttcagcatgcaagtgcttaagtcagaagggcagcagt

SEQ ID NO: 108275 - DNA, 80 bp, synthetic construct
  source 1..80: mol_type = other DNA
tttgcaaggcaaaagctaaatatcatagatttttttctcaatttattttgttattatcacggttgtttctttagcacata

SEQ ID NO: 108276 - DNA, 80 bp, synthetic construct; identical to SEQ ID NO: 21080
  source 1..80: mol_type = other DNA

SEQ ID NO: 108277 - DNA, 80 bp, synthetic construct
  source 1..80: mol_type = other DNA
gtaagtggcaaaactgggatttgaattccgtttccaaagttttaagcacttcaacacacttctataactaaagttgctac

SEQ ID NO: 108278 - DNA, 80 bp, synthetic construct
  source 1..80: mol_type = other DNA
agaggtttctattttttttcaagccagtctttaaatcatgaatcgtattatatagtttcctacgttgagctggtaaaact

SEQ ID NO: 108279 - DNA, 80 bp, synthetic construct
  source 1..80: mol_type = other DNA
taaaatatataaaggaacattagcagtgttatctctggtcaaccataggtgaatttcagtatgagggggtctggaaaacg

SEQ ID NO: 108280 - DNA, 80 bp, synthetic construct; identical to SEQ ID NO: 21081
  source 1..80: mol_type = other DNA

SEQ ID NO: 108281 - DNA, 80 bp, synthetic construct
  source 1..80: mol_type = other DNA
ttcaggatctcctgaatatttggactttgatgaaaacctgttgctactacttgctattactactattaccactactacac

SEQ ID NO: 108282 - DNA, 80 bp, synthetic construct
  source 1..80: mol_type = other DNA
tttctgcatgaggaagtactgcatggaatatagaaatactgtcactccaaatagcttgacttcaatgtttcagatatgag

SEQ ID NO: 108283 - DNA, 80 bp, synthetic construct; identical to SEQ ID NO: 21082
  source 1..80: mol_type = other DNA

SEQ ID NO: 108284 - DNA, 80 bp, synthetic construct
  source 1..80: mol_type = other DNA
attttcctttctcttatttagccacatccatatggtcttgacacttcatgcattctctatgctcccattttccctgatta

SEQ ID NO: 108285 - DNA, 80 bp, synthetic construct
  source 1..80: mol_type = other DNA
gagatcatttttgccactgcagttgaagaaaaacaaacaaacaggcaaaagctaagcaagcaaacaattcctcagtttga

SEQ ID NO: 108286 - DNA, 80 bp, synthetic construct
  source 1..80: mol_type = other DNA
tactaatattgaaataacagatctccattgattagatgacaatttggtctgccttattgaagggagcattggcgaacact

SEQ ID NO: 108287 - DNA, 80 bp, synthetic construct
  source 1..80: mol_type = other DNA
catgccattctcctgcctcagcctccccagcagctgggactataggtgcctaccaccacgcccagctaatttttgtattt

SEQ ID NO: 108288 - DNA, 80 bp, synthetic construct; identical to SEQ ID NO: 21083
  source 1..80: mol_type = other DNA

SEQ ID NO: 108289 - DNA, 80 bp, synthetic construct
  source 1..80: mol_type = other DNA
cccttacatgtatggaaaaacacattagaactgactcactagacgttgaaccctggtgtgcattatcttcagatatttat

SEQ ID NO: 108290 - DNA, 80 bp, synthetic construct
  source 1..80: mol_type = other DNA
ctctgtctctgtctctgtccctcttacacacctctcaaacccattaagtcaacaacagaaacaaaacaaaaacaattatg

SEQ ID NO: 108291 - DNA, 80 bp, synthetic construct; identical to SEQ ID NO: 21084
  source 1..80: mol_type = other DNA

SEQ ID NO: 108292 - DNA, 80 bp, synthetic construct
  source 1..80: mol_type = other DNA
ctcctcattattctttccttccctgaagcttcccagtgtgaagagtgtgcatttaaaataggtgagatataattggaggt

SEQ ID NO: 108293 - DNA, 80 bp, synthetic construct
  source 1..80: mol_type = other DNA
ttcaatgagttcagaaagttgtgcaaaggccacttaccaaggtaaacaagcaggcattccttagttttcctttactgagg

SEQ ID NO: 108294 - DNA, 80 bp, synthetic construct
  source 1..80: mol_type = other DNA
tcttgttcaaaaatgtaaaaataatagaagacttacagtagaaataatatattttttaaaatgttaatggacagaagcca

SEQ ID NO: 108295 - DNA, 80 bp, synthetic construct
  source 1..80: mol_type = other DNA
ttcaaggagagaagcatattagaacatatgcataaaatagcttggagtgataagacaggttgcagtgagattgtgaccca

SEQ ID NO: 108296 - DNA, 80 bp, synthetic construct; identical to SEQ ID NO: 21085
  source 1..80: mol_type = other DNA

SEQ ID NO: 108297 - DNA, 80 bp, synthetic construct
  source 1..80: mol_type = other DNA
ttcactttaacaattcttcagaaaatgagtaatcatggattttaaaggcatcttctaagattttattctttagaatcctg

SEQ ID NO: 108298 - DNA, 80 bp, synthetic construct
  source 1..80: mol_type = other DNA
tggttattaagtctgatactaagtagctaattcagcataaaaatcttggctaatcatttaatctttgggcatcaatttct

SEQ ID NO: 108299 - DNA, 80 bp, synthetic construct
  source 1..80: mol_type = other DNA
cccagtattagactatgaaaatattttactgaaagttctaatatttcgtagaggaggacaatgacatgagtgaagatgac

SEQ ID NO: 108300 - DNA, 80 bp, synthetic construct; identical to SEQ ID NO: 21086
  source 1..80: mol_type = other DNA

SEQ ID NO: 108301 - DNA, 80 bp, synthetic construct
  source 1..80: mol_type = other DNA
acaacacatactccttcaataaatcattgagctttcccctgcaggtttgtatctgaattaatcaatattaaaatagtgct

SEQ ID NO: 108302 - DNA, 80 bp, synthetic construct
  source 1..80: mol_type = other DNA
ttcctcaattttgagacttaactttatcctctcctaacattatttctcttactcttggctctttccataagaaatcgcac

SEQ ID NO: 108303 - DNA, 80 bp, synthetic construct; identical to SEQ ID NO: 21087
  source 1..80: mol_type = other DNA

SEQ ID NO: 108304 - DNA, 80 bp, synthetic construct
  source 1..80: mol_type = other DNA
agtcacccaaattttcttatagacatacacctactattaatgtttggtttacatgaatgtcctatacaaaacttcatgta

SEQ ID NO: 108305 - DNA, 80 bp, synthetic construct
  source 1..80: mol_type = other DNA
ctcaattagctatttttaaaataaatagaaactggcaaattttaaatttcaagtgcttgctttcattttaaaaataaaat

SEQ ID NO: 108306 - DNA, 80 bp, synthetic construct
  source 1..80: mol_type = other DNA
ctgaatgtttgaagtttgtcttctagcatcaagtcttgaagatgtcttaaatttctttttgcgcaaatatgagagcggaa

SEQ ID NO: 108307 - DNA, 80 bp, synthetic construct; identical to SEQ ID NO: 21088
  source 1..80: mol_type = other DNA

SEQ ID NO: 108308 - DNA, 80 bp, synthetic construct
  source 1..80: mol_type = other DNA
tgaatctatacattactttaaagggaaatgatcacttccagataggaaaaggaaatattgcttcacttattcaagccttt

SEQ ID NO: 108309 - DNA, 80 bp, synthetic construct
  source 1..80: mol_type = other DNA
acattaattttcataggatgatcttgtatccagaagttttgctaatttctcttattcatactaatattttgtttgtgggt

SEQ ID NO: 108310 - DNA, 80 bp, synthetic construct
  source 1..80: mol_type = other DNA
catatgtataatttgtaatgctatataaatgcatatatgtgatcatattacacatattcatgcacattgatttttgcgtt

SEQ ID NO: 108311 - DNA, 80 bp, synthetic construct; identical to SEQ ID NO: 21089
  source 1..80: mol_type = other DNA

SEQ ID NO: 108312 - DNA, 80 bp, synthetic construct
  source 1..80: mol_type = other DNA
ggcagaggccgccccaaatgaccacacacccccaaccaacaccaacaccacctgcaaacctatcttattattaatttttt

SEQ ID NO: 108313 - DNA, 80 bp, synthetic construct
  source 1..80: mol_type = other DNA
ctccaaaacttgcctcatagtgttagtagggatattcctgaacaagtctctatttcaatacatgacttgcttcaggtcct

SEQ ID NO: 108314 - DNA, 80 bp, synthetic construct
  source 1..80: mol_type = other DNA
tccctgcttattccaatgaacgttattgccttatgtgatcctggtcagcaattctgtttaaggatccagagcccagcacc

SEQ ID NO: 108315 - DNA, 80 bp, synthetic construct; identical to SEQ ID NO: 21090
  source 1..80: mol_type = other DNA

SEQ ID NO: 108316 - DNA, 80 bp, synthetic construct
  source 1..80: mol_type = other DNA
gattaatttctcatttaattgtgtatgatattgccatattatgtctgatgctcctttaatgaaaccttttaaggagctct

SEQ ID NO: 108317 - DNA, 80 bp, synthetic construct
  source 1..80: mol_type = other DNA
ccctttaatgaaagagaaagcctaatgagacaacacctcctacaggtgaaagttaaagtcactttgcatgatatgattac

SEQ ID NO: 108318 - DNA, 80 bp, synthetic construct
  source 1..80: mol_type = other DNA
attaatattctggcaaatttctaggagacatcactgtcactctaagtgggaaaaataaaaatgactaattaaaatcctga

SEQ ID NO: 108319 - DNA, 80 bp, synthetic construct; identical to SEQ ID NO: 21091
  source 1..80: mol_type = other DNA

SEQ ID NO: 108320 - DNA, 80 bp, synthetic construct
  source 1..80: mol_type = other DNA
tctgcaccttttaaaaatatttccaccttatattggcaaaagaaatatagcatcattgtgtgattaaattacttaatggt

SEQ ID NO: 108321 - DNA, 80 bp, synthetic construct
  source 1..80: mol_type = other DNA
gcacgatttatctgcctgttggacatttaacataacatatatgaatcctcttgcaaggcaaaatatactaatttacatat

SEQ ID NO: 108322 - DNA, 80 bp, synthetic construct
  source 1..80: mol_type = other DNA
ttgaagctatgttgctttaattttttttgattagatacatatggggctgagaaaaaaaatcatgttgtgttcttacattt

SEQ ID NO: 108323 - DNA, 80 bp, synthetic construct; identical to SEQ ID NO: 21092
  source 1..80: mol_type = other DNA

SEQ ID NO: 108324 - DNA, 80 bp, synthetic construct
  source 1..80: mol_type = other DNA
tactttgacaccaggaaatattagacaactctgagcacaatgccatgtccacagaatatacttggattagttagaaattt

SEQ ID NO: 108325 - DNA, 80 bp, synthetic construct
  source 1..80: mol_type = other DNA
gaagttctaatgctgtctccactacaaactgtaactttgaaaaaggtcttgactatttgggcttcatttgtctgtaagac

SEQ ID NO: 108326 - DNA, 80 bp, synthetic construct
  source 1..80: mol_type = other DNA
tctttggatatttataaaatgtagattcctccatttcactacagacccatggaatcagaatagcataagactttttaaaa

SEQ ID NO: 108327 - DNA, 80 bp, synthetic construct; identical to SEQ ID NO: 21093
  source 1..80: mol_type = other DNA

SEQ ID NO: 108328 - DNA, 80 bp, synthetic construct
  source 1..80: mol_type = other DNA
aatggttttactcatatagggacaaagaaacaacagtatagaatacaataagccataaactgatcatttttccttggcac

SEQ ID NO: 108329 - DNA, 80 bp, synthetic construct
  source 1..80: mol_type = other DNA
tagcccacattttgtcaaaaaataaacaaccaaatagaaaatcctgcacatatcatgtatgtagcggtgttttagtcttc

SEQ ID NO: 108330 - DNA, 80 bp, synthetic construct
  source 1..80: mol_type = other DNA
taaaactttacttattctaccaccttccaaacacatcttcagtgtaattcagaccatatcatgggctccagacacatata

SEQ ID NO: 108331 - DNA, 80 bp, synthetic construct; identical to SEQ ID NO: 21094
  source 1..80: mol_type = other DNA

SEQ ID NO: 108332 - DNA, 80 bp, synthetic construct
  source 1..80: mol_type = other DNA
atgtctttggtgacaaataaatgcccatgttgctatttatggtgttgtgtataaatagtgctatttttccatacttcagc

SEQ ID NO: 108333 - DNA, 80 bp, synthetic construct
  source 1..80: mol_type = other DNA
taatttactgctcttgcacttcctggctaagccaaaaggattaatgtgttgtgaaatgaggagtggtggtgggaacagac

SEQ ID NO: 108334 - DNA, 80 bp, synthetic construct
  source 1..80: mol_type = other DNA
agagaaggaaagggtggaataacagatacacttttataggacattcaaagattgtaaacccaataccgtaagctttggag

SEQ ID NO: 108335 - DNA, 80 bp, synthetic construct; identical to SEQ ID NO: 21095
  source 1..80: mol_type = other DNA

SEQ ID NO: 108336 - DNA, 80 bp, synthetic construct
  source 1..80: mol_type = other DNA
agtctataggatgatttatggttcttgattatcagggcctataaagtgtttaatggtgctgggatataaagtggaactct

SEQ ID NO: 108337 - DNA, 80 bp, synthetic construct
  source 1..80: mol_type = other DNA
ggagtttcgaagtcttcagacaacttaccccaaccttaattctagctttgaattgttgagtggaaatggccaagaaaaac

SEQ ID NO: 108338 - DNA, 80 bp, synthetic construct
  source 1..80: mol_type = other DNA
attcctctgccattatatccaaacatacacagacgtggggggcaaaactagtcaataattttgatgtccaattgtattac

SEQ ID NO: 108339 - DNA, 80 bp, synthetic construct; identical to SEQ ID NO: 21096
  source 1..80: mol_type = other DNA

SEQ ID NO: 108340 - DNA, 80 bp, synthetic construct
  source 1..80: mol_type = other DNA
ctatatgtccttacttaaaggcaaaagcctaataatgtatctctgaatgcccccagtgactcatggttatcacaactctg

SEQ ID NO: 108341 - DNA, 80 bp, synthetic construct
  source 1..80: mol_type = other DNA
caacgctaataaaataagtgaatttttagcaagtgaaattgctgcattctgattctgccacagcttagcagcaggcttca

SEQ ID NO: 108342 - DNA, 80 bp, synthetic construct
  source 1..80: mol_type = other DNA
cattttgggggcattaatgcagtttgaattaaaaagtagatatatttatatcatcctaaatcaataatcatatgctgcaa

SEQ ID NO: 108343 - DNA, 80 bp, synthetic construct
  source 1..80: mol_type = other DNA
cagcatgtgattattgatttaggatgatgtaaaatatacaattgcaacaatattagaaattacaaaagcctacttaatga

SEQ ID NO: 108344 - DNA, 80 bp, synthetic construct; identical to SEQ ID NO: 21097
  source 1..80: mol_type = other DNA

SEQ ID NO: 108345 - DNA, 80 bp, synthetic construct
  source 1..80: mol_type = other DNA
ttttattgactttcatattacatgagagtggaggctgggaatggaactgtcgcaaaatacaggtaatcactaaagaaaaa

SEQ ID NO: 108346 - DNA, 80 bp, synthetic construct
  source 1..80: mol_type = other DNA
tataagacccctattctaagacaaaggcagtgtctgtgttaaagtgaaaaaatggaatttaaagtagggcagagatgact

SEQ ID NO: 108347 - DNA, 80 bp, synthetic construct; identical to SEQ ID NO: 21098
  source 1..80: mol_type = other DNA

SEQ ID NO: 108348 - DNA, 80 bp, synthetic construct
  source 1..80: mol_type = other DNA
tgtgtctagtatctgaattaattacatcatattagatgcagaataaataattgttgaatatagcactgatcagtccacac

SEQ ID NO: 108349 - DNA, 80 bp, synthetic construct
  source 1..80: mol_type = other DNA
ttacaagtgtgttaattcagaagagaggggactcattgaaggctgaaataggtagagaaggcttgatgctgtatgtggac

SEQ ID NO: 108350 - DNA, 80 bp, synthetic construct
  source 1..80: mol_type = other DNA
agtgtgacaagactaacgcaggcagaatatgcctcagagcatttgaaaatatcagaatgcagagttctaattaccaaata

SEQ ID NO: 108351 - DNA, 80 bp, synthetic construct
  source 1..80: mol_type = other DNA
actaaatatatattttaggaatagaaaggagagaatcagagaatttggggacaagtgcttcttaatattctttacttccc

SEQ ID NO: 108352 - DNA, 80 bp, synthetic construct; identical to SEQ ID NO: 21099
  source 1..80: mol_type = other DNA

SEQ ID NO: 108353 - DNA, 80 bp, synthetic construct
  source 1..80: mol_type = other DNA
gtgttttgtatactgaggcttaagatcacagggcatctgagttgatattcacaatacaaatgtctccaggcatatgttgt

SEQ ID NO: 108354 - DNA, 80 bp, synthetic construct
  source 1..80: mol_type = other DNA
ctacgtgtcaggcaatattctctaccattttctcattcagtgctcacaactccatgaggtatataggttctgttattatt

SEQ ID NO: 108355 - DNA, 80 bp, synthetic construct; identical to SEQ ID NO: 21100
  source 1..80: mol_type = other DNA

SEQ ID NO: 108356 - DNA, 80 bp, synthetic construct
  source 1..80: mol_type = other DNA
tcacctgctaatctagtgacacctgctttgggaaatgcagctgccatgtgagtaatctaattaacaccaccatgctggag

SEQ ID NO: 108357 - DNA, 80 bp, synthetic construct
  source 1..80: mol_type = other DNA
taatcaagtgaaaacagcctactgtatcctcctgaagtcctgacctactaaatgatgaacaacatgaaatcagctgttgt

SEQ ID NO: 108358 - DNA, 80 bp, synthetic construct
  source 1..80: mol_type = other DNA
aggttttcactgagagtacgccatttagatttaggcttataaattgggtggaatttcattggccaggaaatgccatttta

SEQ ID NO: 108359 - DNA, 80 bp, synthetic construct
  source 1..80: mol_type = other DNA
ggattacaggcacccaccagcatgcccggctaatttttgtatttttagtagagacaggttttcaccatactagccaggct

SEQ ID NO: 108360 - DNA, 80 bp, synthetic construct; identical to SEQ ID NO: 21101
  source 1..80: mol_type = other DNA

SEQ ID NO: 108361 - DNA, 80 bp, synthetic construct
  source 1..80: mol_type = other DNA
aaacatccagcaagcagttggaaaaaacaggtgaagtgcagatcatttacaggtgctgcaaagcaacctacagtattcct

SEQ ID NO: 108362 - DNA, 80 bp, synthetic construct
  source 1..80: mol_type = other DNA
tgtgactggtgaaaacacacccacacactaagactagtgttctcagctgttctttttaccggcatgtttcaaatccaatc

SEQ ID NO: 108363 - DNA, 80 bp, synthetic construct
  source 1..80: mol_type = other DNA
actattcattttgaaaataatactcaatagaaatgcatccaggaattttccagtttaagttatgggcctgagtatattta

SEQ ID NO: 108364 - DNA, 80 bp, synthetic construct; identical to SEQ ID NO: 21102
  source 1..80: mol_type = other DNA

SEQ ID NO: 108365 - DNA, 80 bp, synthetic construct
  source 1..80: mol_type = other DNA
ttcagttttatcattagtgacatttagtgagaatgttaatacaaatattttgttggagctttctggcttggtgtcaacat

SEQ ID NO: 108366 - DNA, 80 bp, synthetic construct
  source 1..80: mol_type = other DNA
ttcttacccagcttgctctactgaagtgctcagaaatataacttcaaaaactctctctctctttctcttttgtagttata

SEQ ID NO: 108367 - DNA, 80 bp, synthetic construct; identical to SEQ ID NO: 21103
  source 1..80: mol_type = other DNA

SEQ ID NO: 108368 - DNA, 80 bp, synthetic construct
  source 1..80: mol_type = other DNA
tttcaatctactacaaactccaacatataaaatttataagtaaatacagagacagaattttcaagttgcctaaatgattt

SEQ ID NO: 108369 - DNA, 80 bp, synthetic construct
  source 1..80: mol_type = other DNA
aactttctctttgtcataatgatacatttaactgttttgtattctattgggctaaagaacttggtaaatatagtttttta

SEQ ID NO: 108370 - DNA, 80 bp, synthetic construct
  source 1..80: mol_type = other DNA
tcctctatctctaactggacaacccaattaaaaagcataatataaaattttcttgaatgacatctgaacaatgttgtcag

SEQ ID NO: 108371 - DNA, 80 bp, synthetic construct
  source 1..80: mol_type = other DNA
acttctttgaagagcttccttaaattacacttgtatattctagacaagctgggctgtattggcatgttaaaacagtgaca

SEQ ID NO: 108372 - DNA, 80 bp, synthetic construct; identical to SEQ ID NO: 21104
  source 1..80: mol_type = other DNA

SEQ ID NO: 108373 - DNA, 80 bp, synthetic construct
  source 1..80: mol_type = other DNA
atatgcattctattaacttctattttaatgttggggagatgagatgaactaggatatcttagggacagggttggctactg

SEQ ID NO: 108374 - DNA, 80 bp, synthetic construct
  source 1..80: mol_type = other DNA
aatactgtaatttccttgagggcagggctcaaggaaattcctgtatccacgtataatgataaagcattattttgtgtagt

SEQ ID NO: 108375 - DNA, 80 bp, synthetic construct
  source 1..80: mol_type = other DNA
tgagatgacaaagttagggttaaatttctacactatacctctgggagcatcctggattataaagtagatatcaccacaaa

SEQ ID NO: 108376 - DNA, 80 bp, synthetic construct; identical to SEQ ID NO: 21105
  source 1..80: mol_type = other DNA

SEQ ID NO: 108377 - DNA, 80 bp, synthetic construct
  source 1..80: mol_type = other DNA
ccaatatctgatagtcttcctggacaaaaaagaaaattacgtatatttaaatccaatgtttacctcacattttatttttt

SEQ ID NO: 108378 - DNA, 80 bp, synthetic construct
  source 1..80: mol_type = other DNA
tctatattgtcttttgaactttttaaaatggaaatcctgtcctaaaacacatttatgtgggatctcaagaatcattctca

SEQ ID NO: 108379 - DNA, 80 bp, synthetic construct
  source 1..80: mol_type = other DNA
taaaatttcaaaatatacttcaaaattaacttagtgaactggactaattcttcgagatttccgtgcactcgagttagtgg

SEQ ID NO: 108380 - DNA, 80 bp, synthetic construct; identical to SEQ ID NO: 21106
  source 1..80: mol_type = other DNA

SEQ ID NO: 108381 - DNA, 80 bp, synthetic construct
  source 1..80: mol_type = other DNA
acaaaaagacagcagtttgcaatccagaagagggctgtcacagcacatcaccattctagcagcctgattttaggcttcca

SEQ ID NO: 108382 - DNA, 80 bp, synthetic construct
  source 1..80: mol_type = other DNA
aatacaccctcttcaagcacactcaggctccatcactatcagtatccctcaagagtgtggtacatttattaccatccaag

SEQ ID NO: 108383 - DNA, 80 bp, synthetic construct; identical to SEQ ID NO: 21107
  source 1..80: mol_type = other DNA

SEQ ID NO: 108384 - DNA, 80 bp, synthetic construct
  source 1..80: mol_type = other DNA
tttatttatctgttcacctattgaaggacatcttggttgcttcctagttttaggaaatacgaataaagctgatataaaca

SEQ ID NO: 108385 - DNA, 80 bp, synthetic construct
  source 1..80: mol_type = other DNA
tgctctacaccctccccagcattttgtattgttagtgttttggattttagctattttaataggtgtgtagtggtatctca

SEQ ID NO: 108386 - DNA, 80 bp, synthetic construct
  source 1..80: mol_type = other DNA
ttctatgttatttcccaggaattttatagttttatgttttacatttaggtctatgatccactttgagttaattttcttgt

SEQ ID NO: 108387 - DNA, 80 bp, synthetic construct
  source 1..80: mol_type = other DNA
gtgcatttctgagttctctattctctttcattgatttatttgtctattctttcactaatatcatactgtcctgattactg

SEQ ID NO: 108388 - DNA, 80 bp, synthetic construct; identical to SEQ ID NO: 21108
  source 1..80: mol_type = other DNA

SEQ ID NO: 108389 - DNA, 80 bp, synthetic construct
  source 1..80: mol_type = other DNA
gatataacagagtaactgacttttgcatattaactttgcgccctgaaaccttgttatattctgtgattagttccaggaag

SEQ ID NO: 108390 - DNA, 80 bp, synthetic construct
  source 1..80: mol_type = other DNA
tgatgttgatgaaggggcgtgaaagcgaacatccttgccgtgttcctgacctcagcaagagagcttttaacttcgcacca

SEQ ID NO: 108391 - DNA, 80 bp, synthetic construct
  source 1..80: mol_type = other DNA
cttctttagcctgttgatgttattgattacttaaacacttttcaaatgtcaaactagacttgcatatctggaatacgtat

SEQ ID NO: 108392 - DNA, 80 bp, synthetic construct; identical to SEQ ID NO: 21109
  source 1..80: mol_type = other DNA

SEQ ID NO: 108393 - DNA, 80 bp, synthetic construct
  source 1..80: mol_type = other DNA
tgtctcttttctactgagagctggaaaaataaggaagattgtgtggagttcgaactgtgttgtgatgcaaccacatagac

SEQ ID NO: 108394 - DNA, 80 bp, synthetic construct
  source 1..80: mol_type = other DNA
atttcaaacataaaaaaaaaacataagaataccatggagtgtgaaagttcatgtggattcttgaatggagaacgtggggt

SEQ ID NO: 108395 - DNA, 80 bp, synthetic construct; identical to SEQ ID NO: 21110
  source 1..80: mol_type = other DNA

SEQ ID NO: 108396 - DNA, 80 bp, synthetic construct
  source 1..80: mol_type = other DNA
ttttttctgtgtgtatcaagggcatactttctatatcctgtgtgccattattactaattctcatgcttacaaccttactt

SEQ ID NO: 108397 - DNA, 80 bp, synthetic construct
  source 1..80: mol_type = other DNA
taaattggactttcctgttgattgattgtacttgcaatcagaagacagcttgttcttcagcattgggggcaatgtggaaa

SEQ ID NO: 108398 - DNA, 80 bp, synthetic construct
  source 1..80: mol_type = other DNA
aaataagtagcccagtcacagaacaaatgattgatagagctaaactaagcccaaagttttatttggagatagctctgtgc

SEQ ID NO: 108399 - DNA, 80 bp, synthetic construct; identical to SEQ ID NO: 21111
  source 1..80: mol_type = other DNA

SEQ ID NO: 108400 - DNA, 80 bp, synthetic construct
  source 1..80: mol_type = other DNA
atatcattggtctataaaaattgggacaataatagtcactaagatgcaggtaaatgttgtgtagaatattgataaagtgt

SEQ ID NO: 108401 - DNA, 80 bp, synthetic construct
  source 1..80: mol_type = other DNA
ctggaaaagtaattgatgataaggaactgtatttaagatagtgaaaaccaattcatttgtcttttcataattaggcctgt

SEQ ID NO: 108402 - DNA, 80 bp, synthetic construct
  source 1..80: mol_type = other DNA
gtggcttcagcataatagcaggagtgaaggtaaatattaatcgataaaaaatgaaattagcagctcaataatcttaaact

SEQ ID NO: 108403 - DNA, 80 bp, synthetic construct; identical to SEQ ID NO: 21112
  source 1..80: mol_type = other DNA

SEQ ID NO: 108404 - DNA, 80 bp, synthetic construct
  source 1..80: mol_type = other DNA
tcataatattaagtaaaataagagtaagaagaagtaaaatgtattatgtgagtaagtgaggcagtggagtggagaattga

SEQ ID NO: 108405 - DNA, 80 bp, synthetic construct
  source 1..80: mol_type = other DNA
cccattccccagcgcctggccagttgtgggcgctcaataaatattaaacaaccaaagcacgaagtattgtcaaaaagttt

SEQ ID NO: 108406 - DNA, 80 bp, synthetic construct
  source 1..80: mol_type = other DNA
ttttaaatgtaaaattgtttctgtctttttttataactttggtacaccaagaaatatgaacattcattatattcaaatgg

SEQ ID NO: 108407 - DNA, 80 bp, synthetic construct; identical to SEQ ID NO: 21113
  source 1..80: mol_type = other DNA

SEQ ID NO: 108408 - DNA, 80 bp, synthetic construct
  source 1..80: mol_type = other DNA
tgaactctgatacatttatgatcaacaggctccaactttatacttaataaaatgtttactaactgtgttaaaatttattc

SEQ ID NO: 108409 - DNA, 80 bp, synthetic construct
  source 1..80: mol_type = other DNA
atagtatttaagtccagagattcaatatgcacaattatactcagatcacaaagtgtacttaaactctattaagagtaaca

SEQ ID NO: 108410 - DNA, 80 bp, synthetic construct
  source 1..80: mol_type = other DNA
gtcttaaagcattatgcataactattagaatatgggacaatttatagaatgtcattattacttctcatattactttatta

SEQ ID NO: 108411 - DNA, 80 bp, synthetic construct
  source 1..80: mol_type = other DNA
caatataaaaatagccattgaaagaacctcatttttttcacacaatccaagagcctaagctttaataagataaaagaaga

SEQ ID NO: 108412 - DNA, 80 bp, synthetic construct; identical to SEQ ID NO: 21114
  source 1..80: mol_type = other DNA

SEQ ID NO: 108413 - DNA, 80 bp, synthetic construct
  source 1..80: mol_type = other DNA
ttttcatatcctttcacatatgttttcatgtttgccctatacaacatcttctcagatgggcagatcagggataattacct

SEQ ID NO: 108414 - DNA, 80 bp, synthetic construct
  source 1..80: mol_type = other DNA
ccccagaagccagaataaattggaaaacattttccatgcaattataaagggattttattttgaaaagcccaaggaaataa

SEQ ID NO: 108415 - DNA, 80 bp, synthetic construct
  source 1..80: mol_type = other DNA
aatcatttagactttgttcttgataaaattattgcaagttctaatttaatttattacaataaatatagtattattatata

SEQ ID NO: 108416 - DNA, 80 bp, synthetic construct; identical to SEQ ID NO: 21115
  source 1..80: mol_type = other DNA

SEQ ID NO: 108417 - DNA, 80 bp, synthetic construct
  source 1..80: mol_type = other DNA
atcaaataggaatatgtctaccagttaccctggatcattgtcttattcccagcaatcttcagcatgtcccctgatgtaat

SEQ ID NO: 108418 - DNA, 80 bp, synthetic construct
  source 1..80: mol_type = other DNA
gtgataaagagtaatagacttaaaggttattgtcttccgcctgtctgaatccagtgctttcctccgcatgttgttgtctt

SEQ ID NO: 108419 - DNA, 80 bp, synthetic construct
  source 1..80: mol_type = other DNA
tccagacagaaatactgcttctgctcaaaaaaagcattttggagttctttcaatgctaaatctttcttttacacaagtta

SEQ ID NO: 108420 - DNA, 80 bp, synthetic construct; identical to SEQ ID NO: 21116
  source 1..80: mol_type = other DNA

SEQ ID NO: 108421 - DNA, 80 bp, synthetic construct
  source 1..80: mol_type = other DNA
gttttgctctcagtgaagtattcactgtttacctatttacagtagttgacagtccaaaagtagaacagtacaaatgattc

SEQ ID NO: 108422 - DNA, 80 bp, synthetic construct
  source 1..80: mol_type = other DNA
tgaagaaatgtgtctgtagccaacttaacccactgatgaaacttagaaacattcattcatatcaggacatccagacatct

SEQ ID NO: 108423 - DNA, 80 bp, synthetic construct
  source 1..80: mol_type = other DNA
agaccaatcaaaaatgtctataaggtaactggtcctgatctttgtaaaaagacagtgtaattaagaagggaagaaggaag

SEQ ID NO: 108424 - DNA, 80 bp, synthetic construct; identical to SEQ ID NO: 21117
  source 1..80: mol_type = other DNA

SEQ ID NO: 108425 - DNA, 80 bp, synthetic construct
  source 1..80: mol_type = other DNA
ccaagatattcctgaggtgactttccagaactgatttattaccagaaaagaactgtgcagtttagcctgaaattatcaaa

SEQ ID NO: 108426 - DNA, 80 bp, synthetic construct
  source 1..80: mol_type = other DNA
aaatgcagataatgctacaagggctgttttaaggtctaagtgaaaacaatttaaggaaatcagcccagtggcagccacat

SEQ ID NO: 108427 - DNA, 80 bp, synthetic construct
  source 1..80: mol_type = other DNA
atgtaagtaaggagtaaagggcaatgtagaaatacatatctgaagaaatagcctggaattcatcccagagaaacaaaaag

SEQ ID NO: 108428 - DNA, 80 bp, synthetic construct; identical to SEQ ID NO: 21118
  source 1..80: mol_type = other DNA

SEQ ID NO: 108429 - DNA, 80 bp, synthetic construct
  source 1..80: mol_type = other DNA
tcctgatacctaataatgccacatgcttttcatatacttatcagcatttagataacctcttctgtggagtgcctctttag

SEQ ID NO: 108430 - DNA, 80 bp, synthetic construct
  source 1..80: mol_type = other DNA
aggagtttcaatgataattaaattcaatgtatcaatctttcctttgtaactaatgctttttgtattctatttaaaaagat

SEQ ID NO: 108431 - DNA, 80 bp, synthetic construct
  source 1..80: mol_type = other DNA
gtcttgattactcctgtaggtttaagataattcttgatatctactactacaaaccttccagtttgatcttgttcaggatt

SEQ ID NO: 108432 - DNA, 80 bp, synthetic construct
  source 1..80: mol_type = other DNA
gtcatctgattggtgaacataaaatatccctccattgagttttgtgttccttaatttctcaaatatgttaaaatgtaaga

SEQ ID NO: 108433 - DNA, 80 bp, synthetic construct; identical to SEQ ID NO: 21119
  source 1..80: mol_type = other DNA

SEQ ID NO: 108434 - DNA, 80 bp, synthetic construct
  source 1..80: mol_type = other DNA
ggaaaacccactatggtgtgtgatagaactggtgatcgcaaacatccttattttgttttgattagcagggggaaaacctt

SEQ ID NO: 108435 - DNA, 80 bp, synthetic construct
  source 1..80: mol_type = other DNA
taattttttgagcttgcatttctgaaattaaaccaacctgactgcattttatctttcatacgtactagcagacttaatct

SEQ ID NO: 108436 - DNA, 80 bp, synthetic construct; identical to SEQ ID NO: 21120
  source 1..80: mol_type = other DNA

SEQ ID NO: 108437 - DNA, 80 bp, synthetic construct
  source 1..80: mol_type = other DNA
accttctctgttttttcttaatatattttcataagcattcataatttttattgtattttattgataataatattttgact

SEQ ID NO: 108438 - DNA, 80 bp, synthetic construct
  source 1..80: mol_type = other DNA
aagcatataaattttatcatacatttgttcattagatctccaaaatcccacttttttctttgacttatagaatacttaga

SEQ ID NO: 108439 - DNA, 80 bp, synthetic construct
  source 1..80: mol_type = other DNA
gtggttttccaggaaaaggagattttaggtatagccaatgatatatgaggaaagacaaaggagtgggaaagacttagatg

SEQ ID NO: 108440 - DNA, 80 bp, synthetic construct
  source 1..80: mol_type = other DNA
gagtctattctatgaatgttctgtctcaaatcaacatggaaatgaaacactgacaatttgtaactataatagagccacac

SEQ ID NO: 108441 - DNA, 80 bp, synthetic construct; identical to SEQ ID NO: 21121
  source 1..80: mol_type = other DNA

SEQ ID NO: 108442 - DNA, 80 bp, synthetic construct
  source 1..80: mol_type = other DNA
ttttaacttcttggagtcaaaagaagaccgtcatcagtttctctttctataccacaagatatctggaatatcctttagtg

SEQ ID NO: 108443 - DNA, 80 bp, synthetic construct
  source 1..80: mol_type = other DNA
cacttggtatgtaatgcccagattagggctattctttagctaaactgggagctgggacgttgattttatgttttaggctt

SEQ ID NO: 108444 - DNA, 80 bp, synthetic construct; identical to SEQ ID NO: 21122
  source 1..80: mol_type = other DNA

SEQ ID NO: 108445 - DNA, 80 bp, synthetic construct
  source 1..80: mol_type = other DNA
catgcctggctaatttttttgtattgttttgttttgtttgttttagtagagacagggtttcaccatgttggtcaggctgg

SEQ ID NO: 108446 - DNA, 80 bp, synthetic construct
  source 1..80: mol_type = other DNA
agtggtaagaaaatattgtgccgtttgaagtgtccctcatatgacacatattacttcggagaggtagacctacagccata

SEQ ID NO: 108447 - DNA, 80 bp, synthetic construct
  source 1..80: mol_type = other DNA
gaaaaaatattgcatcagtttagtctccagatacatattatggtggaaagtggaaacagaggtttctcgtcaattctcag

SEQ ID NO: 108448 - DNA, 80 bp, synthetic construct; identical to SEQ ID NO: 21123
  source 1..80: mol_type = other DNA

SEQ ID NO: 108449 - DNA, 80 bp, synthetic construct
  source 1..80: mol_type = other DNA
cagtggttctggtagaagacaatgaaggcttgaattagtatggcagtaatggctacaaataagagaaaatatgctcaaga

SEQ ID NO: 108450 - DNA, 80 bp, synthetic construct
  source 1..80: mol_type = other DNA
tccgcctcctgggttcacgccattctcctgcctcagcctcccgagtagctgggattacaggcacctgccaccacgcctgg

SEQ ID NO: 108451 - DNA, 80 bp, synthetic construct
  source 1..80: mol_type = other DNA
tattttttattattttaagttccggggtacaagtgcaggaagcgcaggtttgttacataggtaaacgtgtgccatggtgg

SEQ ID NO: 108452 - DNA, 80 bp, synthetic construct
  source 1..80: mol_type = other DNA
atatagggcagagtttcaactttgagagcagatatatctcaaaaggaaatggtacagaatgagaagttcagaggattaat

SEQ ID NO: 108453 - DNA, 80 bp, synthetic construct; identical to SEQ ID NO: 21124
  source 1..80: mol_type = other DNA

SEQ ID NO: 108454 - DNA, 80 bp, synthetic construct
  source 1..80: mol_type = other DNA
gagacagggagagagagagaggtgtaaatcaaggaaaagaagtaattttaatcagagaaaaaacatttccaagatgagga

SEQ ID NO: 108455 - DNA, 80 bp, synthetic construct
  source 1..80: mol_type = other DNA
gtatggatgactgatttgaaggaaaaactggagaaactggtcctgaagagaaggagaaacactacctctgagattaaaag

SEQ ID NO: 108456 - DNA, 80 bp, synthetic construct
  source 1..80: mol_type = other DNA
gtaataggattgccgtgtcaaacagtatttctggttctagatccttgaggaattgccacactgtcttccacaatggttga

SEQ ID NO: 108457 - DNA, 80 bp, synthetic construct
  source 1..80: mol_type = other DNA
agggaggggaacatcacacactggggcctgtcggtgggtggggggcaaagggagggatagcattaggagaaatacctaat

SEQ ID NO: 108458 - DNA, 80 bp, synthetic construct; identical to SEQ ID NO: 21125
  source 1..80: mol_type = other DNA

SEQ ID NO: 108459 - DNA, 80 bp, synthetic construct
  source 1..80: mol_type = other DNA
gttctttccccaaacaaatgcaaatgtaaatgttaccttatctcatcatgaccagacaagctcaattacctccatgcaaa

SEQ ID NO: 108460 - DNA, 80 bp, synthetic construct
  source 1..80: mol_type = other DNA
ttcatgtgctactagcactttgacttaaatttatgtaaaattaatcttgccttttctctccaaagtctttagcttttctt

SEQ ID NO: 108461 - DNA, 80 bp, synthetic construct; identical to SEQ ID NO: 21126
  source 1..80: mol_type = other DNA

SEQ ID NO: 108462 - DNA, 80 bp, synthetic construct
  source 1..80: mol_type = other DNA
tcctacaatggtcttgagataattactgttcctcatatacatactacaaatttgtatcactttgccttgctctgaaatct

SEQ ID NO: 108463 - DNA, 80 bp, synthetic construct
  source 1..80: mol_type = other DNA
cctgatggctttcaaccttgaaatatggtaatacaaaaaactttcattgacagtaaaacttcaggccagcttagtgactt

SEQ ID NO: 108464 - DNA, 80 bp, synthetic construct
  source 1..80: mol_type = other DNA
gcaagctgctatcatattaatgactaaatactatgtatctccaaataaaatatgacttaaaagtaggcttaagataagac

SEQ ID NO: 108465 - DNA, 80 bp, synthetic construct; identical to SEQ ID NO: 21127
  source 1..80: mol_type = other DNA

SEQ ID NO: 108466 - DNA, 80 bp, synthetic construct
  source 1..80: mol_type = other DNA
aaacccttcatgagtttcaaaacagctatggttgctttgaaaaggacacttatttctgttcgtgctgtagttgcaaataa

SEQ ID NO: 108467 - DNA, 80 bp, synthetic construct
  source 1..80: mol_type = other DNA
ccaaaatgtttggccatactctataaactcagtgaccattcttagttgaggactctggtgagttcactaattgatggttc

SEQ ID NO: 108468 - DNA, 80 bp, synthetic construct
  source 1..80: mol_type = other DNA
cttagttgaggactctggtgagttcactaattgatggttcaatttcaattctgtctatgtgctaactccaatttgtcctg

SEQ ID NO: 108469 - DNA, 80 bp, synthetic construct; identical to SEQ ID NO: 21128
  source 1..80: mol_type = other DNA

SEQ ID NO: 108470 - DNA, 80 bp, synthetic construct
  source 1..80: mol_type = other DNA
tgtgttaaatataatttggccaaggttttcttctaacaatatccaggctcccattgatgcagagcgcagagtctatggat

SEQ ID NO: 108471 - DNA, 80 bp, synthetic construct
  source 1..80: mol_type = other DNA
acaacgtcaagagattgagaccaccctggccaacatggtgaaaccctgtctgtactaaaaatacaaaaattagctgggcg

SEQ ID NO: 108472 - DNA, 80 bp, synthetic construct
  source 1..80: mol_type = other DNA
taataaaaataaaatctcactccaaaagaaacctatcttctgctatttggacatcttgttgcttttagctttgtctaatt

SEQ ID NO: 108473 - DNA, 80 bp, synthetic construct; identical to SEQ ID NO: 21129
  source 1..80: mol_type = other DNA

SEQ ID NO: 108474 - DNA, 80 bp, synthetic construct
  source 1..80: mol_type = other DNA
gaaatgactaggaaatagattttagccctatctactgtaaattcagaataatagagctgtatttgaaagagagcatctat

SEQ ID NO: 108475 - DNA, 80 bp, synthetic construct
  source 1..80: mol_type = other DNA
tatcaataaacataaatttatattagatattaagttacattcctgtattcatttatattcatatgtatacattgtttggg

SEQ ID NO: 108476 - DNA, 80 bp, synthetic construct
  source 1..80: mol_type = other DNA
tgtgtgtaagggtatgtgtgcaggtttgcgtgtgtgtatgcatcagtgtatgttgaggataggcttattaaattgtctct

SEQ ID NO: 108477 - DNA, 80 bp, synthetic construct; identical to SEQ ID NO: 21130
  source 1..80: mol_type = other DNA

SEQ ID NO: 108478 - DNA, 80 bp, synthetic construct
  source 1..80: mol_type = other DNA
tggtcctaaaggaataaaactataggctttagaacagtaatgataaaatcttgtgcaaaataggtttgtttctatatcaa

SEQ ID NO: 108479 - DNA, 80 bp, synthetic construct
  source 1..80: mol_type = other DNA
tttaattgaaaccgcaccaatctcctctttggctcgttcagtttctgcaagttcagatattaaaggaatgagaagtggat

SEQ ID NO: 108480 - DNA, 80 bp, synthetic construct
  source 1..80: mol_type = other DNA
ttctcttccaaggtgcaactctattatcttaaaaatgtaggtagtgaccataaaagaaggtggcctattccatagacttt

SEQ ID NO: 108481 - DNA, 80 bp, synthetic construct
  source 1..80: mol_type = other DNA
gcaattcccctgccccagcctcccgagtagctgggactacaaccgcccgccaccatgcccagctaatttttgtattttta

SEQ ID NO: 108482 - DNA, 80 bp, synthetic construct; identical to SEQ ID NO: 21131
  source 1..80: mol_type = other DNA

SEQ ID NO: 108483 - DNA, 80 bp, synthetic construct
  source 1..80: mol_type = other DNA
gctgccctgaagtcataatctgaactgttggggctaggacagagtattggatcacaaatcaaagctagttaaagtcaaag

SEQ ID NO: 108484 - DNA, 80 bp, synthetic construct
  source 1..80: mol_type = other DNA
tatcacccttcacccatatatgctcagcactgatgctctgagaacaaccaaatcaaacaaggcgagcctttacacccctc

SEQ ID NO: 108485 - DNA, 80 bp, synthetic construct
  source 1..80: mol_type = other DNA
tctcaataccctgggcttcaagactgaacagactcctggctgttttataccttccaggtaaagactttagatcaatggct

SEQ ID NO: 108486 - DNA, 80 bp, synthetic construct; identical to SEQ ID NO: 21132
  source 1..80: mol_type = other DNA

SEQ ID NO: 108487 - DNA, 80 bp, synthetic construct
  source 1..80: mol_type = other DNA
cctgtatcttcagcctcttctcagaatgttcattttactttcttcctttaatcaaatcctagctcactaaggccactgta

SEQ ID NO: 108488 - DNA, 80 bp, synthetic construct
  source 1..80: mol_type = other DNA
ttatctccttgcttcctccaaaccccagttcttttgaagtacatgctatcaggttgcaccactctctactcctcttcatt

SEQ ID NO: 108489 - DNA, 80 bp, synthetic construct
  source 1..80: mol_type = other DNA
ccttagaataagctggggagtttttctaagcctatgatattcagatatctggagtgggcaacagagctttgagattctaa

SEQ ID NO: 108490 - DNA, 80 bp, synthetic construct; identical to SEQ ID NO: 21133
  source 1..80: mol_type = other DNA

SEQ ID NO: 108491 - DNA, 80 bp, synthetic construct
  source 1..80: mol_type = other DNA
tccattccttgttcttgccactttctcatttttcaagattttcctcatatcctcactttacttcttaccaagcttatgca

SEQ ID NO: 108492 - DNA, 80 bp, synthetic construct
  source 1..80: mol_type = other DNA
caggaccctagaaatctccctctaaaggatcttgggaagaatccttccttgcctcctcctagagtctgctagttgccagg

SEQ ID NO: 108493 - DNA, 80 bp, synthetic construct
  source 1..80: mol_type = other DNA
cttaacttgagtatatctatgaagaccctatttcaaaatcggtcacattcataggtaccagggtagagcttcaacatatc

SEQ ID NO: 108494 - DNA, 80 bp, synthetic construct; identical to SEQ ID NO: 21134
  source 1..80: mol_type = other DNA

SEQ ID NO: 108495 - DNA, 80 bp, synthetic construct
  source 1..80: mol_type = other DNA
gttccaaaaggtgatcagttcctgcccctttttagtaccaatccttccatatttttttctggatcccatctccttttgcc

SEQ ID NO: 108496 - DNA, 80 bp, synthetic construct
  source 1..80: mol_type = other DNA
tcaattctatatgacattttcagctacctcatctctctgcatagagctgctacactcaatgtcaccacttctatcctctc

SEQ ID NO: 108497 - DNA, 80 bp, synthetic construct
  source 1..80: mol_type = other DNA
ttacttttcctactagcactgcacgcttctctatctcaaagttacagttgttctatattttgtaataattatttccttat

SEQ ID NO: 108498 - DNA, 80 bp, synthetic construct; identical to SEQ ID NO: 21135
  source 1..80: mol_type = other DNA

SEQ ID NO: 108499 - DNA, 80 bp, synthetic construct
  source 1..80: mol_type = other DNA
cacatcagcagcatacgtgagagtttcttttgctccgtatcactaccatcaccagaataagcctattccctaattttgaa

SEQ ID NO: 108500 - DNA, 80 bp, synthetic construct
  source 1..80: mol_type = other DNA
atcaaggtctttgtcttttttttttttaatttttggagttgttcatctattttttgctattaatctcttgctatttaaat

SEQ ID NO: 108501 - DNA, 80 bp, synthetic construct
  source 1..80: mol_type = other DNA
aagaaactgtatattttcctaggttaaaagaaactatgccatgttttgcctttagtatttaagttcttgaaccatttgga

SEQ ID NO: 108502 - DNA, 80 bp, synthetic construct; identical to SEQ ID NO: 21136
  source 1..80: mol_type = other DNA

SEQ ID NO: 108503 - DNA, 80 bp, synthetic construct
  source 1..80: mol_type = other DNA
tcttaactgaacctagattttacttctgtcagtattcatcagtctagctctttgtgtcaaccttgatgaacattcttgga

SEQ ID NO: 108504 - DNA, 80 bp, synthetic construct
  source 1..80: mol_type = other DNA
cactctagtgctgtatgagtgctgttttgaatatattctggcagcaccagctgtgatactattagtaattatataatata

SEQ ID NO: 108505 - DNA, 80 bp, synthetic construct; identical to SEQ ID NO: 21137
  source 1..80: mol_type = other DNA

SEQ ID NO: 108506 - DNA, 80 bp, synthetic construct
  source 1..80: mol_type = other DNA
atttaggcactgaagtgtggttaaggagatgaatatagtcaggctcggtggctgaacataacacccaatctgtgcaatgc

SEQ ID NO: 108507 - DNA, 80 bp, synthetic construct
  source 1..80: mol_type = other DNA
ccttgaggtggaataaagtgacctgggacagtgctacccaaggttctgaaaaatagtgatccttgatgtgatcattgaaa

SEQ ID NO: 108508 - DNA, 80 bp, synthetic construct
  source 1..80: mol_type = other DNA
tgttgtgtcctctccatgcttggaaatgactaattttattgtcaacctctgtgttgctatccaatgtgtggagaggcaca

SEQ ID NO: 108509 - DNA, 80 bp, synthetic construct; identical to SEQ ID NO: 21138
  source 1..80: mol_type = other DNA

SEQ ID NO: 108510 - DNA, 80 bp, synthetic construct
  source 1..80: mol_type = other DNA
tcttccctatgctgttctcgtgatagtgaataagtctcacaagagctgatggttttaaaaatgggagttctctcacacaa

SEQ ID NO: 108511 - DNA, 80 bp, synthetic construct
  source 1..80: mol_type = other DNA
gaaaagggactaatatatgctctattctgaaggtgatgtacgtcccaagcttgtccatgtcctccagtatttttcctaca

SEQ ID NO: 108512 - DNA, 80 bp, synthetic construct
  source 1..80: mol_type = other DNA
attcaacattatggaattgcatcacataaatacatagtttatgttaaattatctatctctatcattctcatttgacctca

SEQ ID NO: 108513 - DNA, 80 bp, synthetic construct; identical to SEQ ID NO: 21139
  source 1..80: mol_type = other DNA

SEQ ID NO: 108514 - DNA, 80 bp, synthetic construct
  source 1..80: mol_type = other DNA
tgctaatttcctgcaaaatatgctgatctcttcaaaacctgattggatagtctgtttcatagatagcagaacttacagat

SEQ ID NO: 108515 - DNA, 80 bp, synthetic construct
  source 1..80: mol_type = other DNA
ttgtttgatatattttcttgattaagcatttctacagactaagtatcagcatagcaaagactccataatatagagttcca

SEQ ID NO: 108516 - DNA, 80 bp, synthetic construct
  source 1..80: mol_type = other DNA
caatttttatctgatgtatctactgacataatatgtctcaaaaactacttgggaggcttaggcaggagaatcacttgaac

SEQ ID NO: 108517 - DNA, 80 bp, synthetic construct; identical to SEQ ID NO: 21140
  source 1..80: mol_type = other DNA

SEQ ID NO: 108518 - DNA, 80 bp, synthetic construct
  source 1..80: mol_type = other DNA
tcagcattttttcctaagcatattgtcaaagttaccattgctgcaaatgccacagtatgttatggttatcagttaatact

SEQ ID NO: 108519 - DNA, 80 bp, synthetic construct
  source 1..80: mol_type = other DNA
tgcctactggtttgatcaactgattaatctttaggataattcagtctgatgtgtactgaagagttcacttattatactgc

SEQ ID NO: 108520 - DNA, 80 bp, synthetic construct
  source 1..80: mol_type = other DNA
gctggtaagccattctcaaaattagcattagcatagtctatagcagaaaattcaaatgagtaagctgcccaaatatgctc

SEQ ID NO: 108521 - DNA, 80 bp, synthetic construct
  source 1..80: mol_type = other DNA
attggaagctaaagaaaaataagatctgagaaaaggaaaatataatactgtgccatttttctgatataatccaaatatat

SEQ ID NO: 108522 - DNA, 80 bp, synthetic construct; identical to SEQ ID NO: 21141
  source 1..80: mol_type = other DNA

SEQ ID NO: 108523 - DNA, 80 bp, synthetic construct
  source 1..80: mol_type = other DNA
acacactatcttaggttcttcttacatgcgtaagtgagaagatgtgttatgcttgaggaaatgcaactctgaaccaacag

SEQ ID NO: 108524 - DNA, 80 bp, synthetic construct
  source 1..80: mol_type = other DNA
ttcactcaataagccatcatcaagcgcccaatgtgtcctggcattacaataggtgctctgggaataaagagaaaaaacag

SEQ ID NO: 108525 - DNA, 80 bp, synthetic construct; identical to SEQ ID NO: 21142
  source 1..80: mol_type = other DNA

SEQ ID NO: 108526 - DNA, 80 bp, synthetic construct
  source 1..80: mol_type = other DNA
acaatactaaataactcagtgaagctccttcagtaggagttagccaggcaaaatcaagaggtgatagttttaaatgaggg

SEQ ID NO: 108527 - DNA, 80 bp, synthetic construct
  source 1..80: mol_type = other DNA
ttttttctcatcagaatgtaaatatattttgggcaaaatctacttttgctctcactgcaactcccctgagcactcaggaa

SEQ ID NO: 108528 - DNA, 80 bp, synthetic construct
  source 1..80: mol_type = other DNA
tgcttttacactaaactgtgaaagagtacttcgcaaatactgcacagatgaattcactgagggtcttgtgaagttgcaga

SEQ ID NO: 108529 - DNA, 80 bp, synthetic construct
  source 1..80: mol_type = other DNA
atttctaataacattttgggtgattctgatgctgctagttcacagaacacacattgaggagcaagagtgtaacatttggc

SEQ ID NO: 108530 - DNA, 80 bp, synthetic construct; identical to SEQ ID NO: 21143
  source 1..80: mol_type = other DNA

SEQ ID NO: 108531 - DNA, 80 bp, synthetic construct
  source 1..80: mol_type = other DNA
ttctaaagtttatgaatcccaacttaattgttttaacacaaagaaacatgcatgtgctgatgccagattgcagcaactaa

SEQ ID NO: 108532 - DNA, 80 bp, synthetic construct
  source 1..80: mol_type = other DNA
aaagggtgaaaaaaattaaatttgctattatattagatcaatatgaaataaatttgagtcaaaatagtaagtacaaaaga

SEQ ID NO: 108533 - DNA, 80 bp, synthetic construct
  source 1..80: mol_type = other DNA
acaggcacacaccaccatgtgtagccagatttgtagtgtgtgtgtgtgtgtgtgtgtgtgtgtgtgtgtgtgtgtgtgtg

SEQ ID NO: 108534 - DNA, 80 bp, synthetic construct; identical to SEQ ID NO: 21144
  source 1..80: mol_type = other DNA

SEQ ID NO: 108535 - DNA, 80 bp, synthetic construct
  source 1..80: mol_type = other DNA
tctcaagattaagctgacatttacattataataagtactaattttataagaattgcaagcactaattttacatgaagtgc

SEQ ID NO: 108536 - DNA, 80 bp, synthetic construct
  source 1..80: mol_type = other DNA
tgaagactagaatatgttcatactgaaagaactctacaaactatattttaaaaatatagagtgtcatagaatgctacggt

SEQ ID NO: 108537 - DNA, 80 bp, synthetic construct
  source 1..80: mol_type = other DNA
aagctatgacgatttagctaaaattaaacaaaatgagaacattatcaaatgttgtctggcaaatgaagagcaattaaata

SEQ ID NO: 108538 - DNA, 80 bp, synthetic construct; identical to SEQ ID NO: 21145
  source 1..80: mol_type = other DNA

SEQ ID NO: 108539 - DNA, 80 bp, synthetic construct
  source 1..80: mol_type = other DNA
ctcttgtacttttcatcctgtttcccttaaccataattaaaaatatctgaaaagtgaacaacctttaagttgtgattatt

SEQ ID NO: 108540 - DNA, 80 bp, synthetic construct
  source 1..80: mol_type = other DNA
agaactgataggtgttttgaagaaaactatttcttctccttattgctgcccgagtcacaatctgaggaccttctcaagga

SEQ ID NO: 108541 - DNA, 80 bp, synthetic construct
  source 1..80: mol_type = other DNA
atactatttttcgaatctccagttgttctccattttcctgctggtgcagcgtttatagagtgctttctgtatctctgtgc

SEQ ID NO: 108542 - DNA, 80 bp, synthetic construct
  source 1..80: mol_type = other DNA
tagagcatttttacaacgttgaatgtctcagcatccttgctttttgtagggccaaaacacataaatatattttaattggt

SEQ ID NO: 108543 - DNA, 80 bp, synthetic construct; identical to SEQ ID NO: 21146
  source 1..80: mol_type = other DNA

SEQ ID NO: 108544 - DNA, 80 bp, synthetic construct
  source 1..80: mol_type = other DNA
aagataggaaaaaagttgtaaaactagcctgtaaaagaacttctagtcaattttcaaaggactgacaactaaccagatta

SEQ ID NO: 108545 - DNA, 80 bp, synthetic construct
  source 1..80: mol_type = other DNA
gtgtattttttcacttggacaaaaaacaacagagttcacatgcataaaacataggaaaagcggattcaaaattgcaggtc

SEQ ID NO: 108546 - DNA, 80 bp, synthetic construct
  source 1..80: mol_type = other DNA
gattagactgtaatttttcccacccctccttccaattttctctccttaaatttcacaatgaggtgaaatttcacagtgag

SEQ ID NO: 108547 - DNA, 80 bp, synthetic construct; identical to SEQ ID NO: 21147
  source 1..80: mol_type = other DNA

SEQ ID NO: 108548 - DNA, 80 bp, synthetic construct
  source 1..80: mol_type = other DNA
catttctttggaaacaattactgtgaaaggatatgcagtatttatttccattactgcgaaatacttctcatagcagtatt

SEQ ID NO: 108549 - DNA, 80 bp, synthetic construct
  source 1..80: mol_type = other DNA
ggtatgctgtttcatggttcatcaaacataaggcagaaaaaaagaaatatgtccagtaccttctgcaggtttttttgttt

SEQ ID NO: 108550 - DNA, 80 bp, synthetic construct
  source 1..80: mol_type = other DNA
ttctgttttgtgggaataagtattagagtgaagcaggagtgagaaactctttataaaatatcttatattaataatatttt

SEQ ID NO: 108551 - DNA, 80 bp, synthetic construct; identical to SEQ ID NO: 21148
  source 1..80: mol_type = other DNA

SEQ ID NO: 108552 - DNA, 80 bp, synthetic construct
  source 1..80: mol_type = other DNA
cattcagcctagatctgataaatttattattttctattatttaggccatgaaactttctgctcccaccacttgaaaatga

SEQ ID NO: 108553 - DNA, 80 bp, synthetic construct
  source 1..80: mol_type = other DNA
tgaattgatacctgcaaaaggtagctaaattgttttctggcttataattatctggcttggaacctagaacagtagacatt

SEQ ID NO: 108554 - DNA, 80 bp, synthetic construct; identical to SEQ ID NO: 21149
  source 1..80: mol_type = other DNA

SEQ ID NO: 108555 - DNA, 80 bp, synthetic construct
  source 1..80: mol_type = other DNA
taaatatttagggaaatgcttttctcaggatattgctttgtgtctctcagtaatgggcatattaaacactaccctctgaa

SEQ ID NO: 108556 - DNA, 80 bp, synthetic construct
  source 1..80: mol_type = other DNA
actttatgtgtgcatgtgagtgtgtatgaagaaagattagaagaaaatatgccaacatactaatggtagttgtggacaga

SEQ ID NO: 108557 - DNA, 80 bp, synthetic construct
  source 1..80: mol_type = other DNA
tgtgtccagcacactacaatgaaaataattttagaatagatttttcttaattaaccccagctctgaaaaccaatgtgaaa

SEQ ID NO: 108558 - DNA, 80 bp, synthetic construct
  source 1..80: mol_type = other DNA
gacataatacagttttatattaacaatatgcagtggccacttctacttgaaacataagaatcttataacacaacagctta

SEQ ID NO: 108559 - DNA, 80 bp, synthetic construct; identical to SEQ ID NO: 21150
  source 1..80: mol_type = other DNA

SEQ ID NO: 108560 - DNA, 80 bp, synthetic construct
  source 1..80: mol_type = other DNA
tcagatatcaattgtattaaaatgaaagaataaaacacgatatgaagtccagggtcaggcaaatgaaactcaaaatgtca

SEQ ID NO: 108561 - DNA, 80 bp, synthetic construct
  source 1..80: mol_type = other DNA
cattatgccctttcagcattcttggctcaaacagcttaaaacattacaaaggcttacttggtcaatatacttccctgccc

SEQ ID NO: 108562 - DNA, 80 bp, synthetic construct; identical to SEQ ID NO: 21151
  source 1..80: mol_type = other DNA

SEQ ID NO: 108563 - DNA, 80 bp, synthetic construct
  source 1..80: mol_type = other DNA
ccgcctgtagtaccaactactcgggagactgaggcaggagagtggcatgaacccgggaggtggagctcgcagtgagcaga

SEQ ID NO: 108564 - DNA, 80 bp, synthetic construct
  source 1..80: mol_type = other DNA
tgtggaacctgcctgattgacaactttagtcaactataatactaggaattttgctttgtttttcagcatgatttatcttc

SEQ ID NO: 108565 - DNA, 80 bp, synthetic construct
  source 1..80: mol_type = other DNA
gaattcatcactcaatctgagtttagatgaataaaatctacctggatctgctcgtagaattcaaggagcagctagtgatt

SEQ ID NO: 108566 - DNA, 80 bp, synthetic construct; identical to SEQ ID NO: 21152
  source 1..80: mol_type = other DNA

SEQ ID NO: 108567 - DNA, 80 bp, synthetic construct
  source 1..80: mol_type = other DNA
gtagagagatacaaatggaagattatacatgcaggaaagtatttttaattggtagtatcagaccaacttctcagagacag

SEQ ID NO: 108568 - DNA, 80 bp, synthetic construct
  source 1..80: mol_type = other DNA
caccatgatgtcctggcaactttgcacatatccatacaggccatgcaggtaaagttttgaaccacagttaatttaagttt

SEQ ID NO: 108569 - DNA, 80 bp, synthetic construct
  source 1..80: mol_type = other DNA
gagctgcagaccacaaaatcattttgctgtagtctggattagctcctcagcaatgacgtgtccccaacttgtgttgcatt

SEQ ID NO: 108570 - DNA, 80 bp, synthetic construct; identical to SEQ ID NO: 21153
  source 1..80: mol_type = other DNA

SEQ ID NO: 108571 - DNA, 80 bp, synthetic construct
  source 1..80: mol_type = other DNA
gtttttcattttcacctcaggactcctttaaaatcttaactattaaaactcccaaacagcttttatttacgtagcttctt

SEQ ID NO: 108572 - DNA, 80 bp, synthetic construct
  source 1..80: mol_type = other DNA
gagtgacttttttattacttttgtgactattattaatgtctggtttaatgagaaagcaataggatttgcacatctgcttg

SEQ ID NO: 108573 - DNA, 80 bp, synthetic construct
  source 1..80: mol_type = other DNA
ttgaccactgattttggagattattgatctagtttacatgagaagttagtaagaccaacatgaggtcacaaatggcaatg

SEQ ID NO: 108574 - DNA, 80 bp, synthetic construct; identical to SEQ ID NO: 21154
  source 1..80: mol_type = other DNA

SEQ ID NO: 108575 - DNA, 80 bp, synthetic construct
  source 1..80: mol_type = other DNA
agctgtgaaattgaaacttgactactgttttatataccccaaaggcttagaagactttgatttgaatgccgatgagaatg

SEQ ID NO: 108576 - DNA, 80 bp, synthetic construct
  source 1..80: mol_type = other DNA
aaagcacattcatgcaaaatgtatgcacataatagatccagttatccaaggggaatatagacagaatagcagtcaaaacc

SEQ ID NO: 108577 - DNA, 80 bp, synthetic construct
  source 1..80: mol_type = other DNA
agaatgtattccacatattcataaattcagtggtcacctatacactaatcaattcatccaaatctatgataggagtgtaa

SEQ ID NO: 108578 - DNA, 80 bp, synthetic construct
  source 1..80: mol_type = other DNA
ccacaatctcttctagaaggtcgtaaaatataggctgtgactggattaatcaaaaaaagtggaagtgatattccaaaaat

SEQ ID NO: 108579 - DNA, 80 bp, synthetic construct; identical to SEQ ID NO: 21155
  source 1..80: mol_type = other DNA

SEQ ID NO: 108580 - DNA, 80 bp, synthetic construct
  source 1..80: mol_type = other DNA
tgtgcatattccagtatggtaatctcacctcagcgggatagaatgttggggatcacttagaaacaacacttagaaaacac

SEQ ID NO: 108581 - DNA, 80 bp, synthetic construct
  source 1..80: mol_type = other DNA
agcagaattggctctaaaaatcaggaataaaagacaggaagaaaatgtattttaatttaccacaggttatttttctctat

SEQ ID NO: 108582 - DNA, 80 bp, synthetic construct
  source 1..80: mol_type = other DNA
aaattgtttattccaatgatataataaggataaaaacaaagataacaccgaaaatgaattaaatgatatggacatggcct

SEQ ID NO: 108583 - DNA, 80 bp, synthetic construct; identical to SEQ ID NO: 21156
  source 1..80: mol_type = other DNA

SEQ ID NO: 108584 - DNA, 80 bp, synthetic construct
  source 1..80: mol_type = other DNA
aattctacagacaagaaagcctctgaaacttaaattccttcaagattagtaaaatcttgttaaattacaacaaatttttg

SEQ ID NO: 108585 - DNA, 80 bp, synthetic construct
  source 1..80: mol_type = other DNA
gacctattccatcataactgattctggtttctgttgttgccctggatcccttgaaggtgcatggcttttatttattgcca

SEQ ID NO: 108586 - DNA, 80 bp, synthetic construct
  source 1..80: mol_type = other DNA
aactctgttatgggattggatgactcctgaatttactgagtagacatggttctcaataactgggtttttggttttcacat

SEQ ID NO: 108587 - DNA, 80 bp, synthetic construct; identical to SEQ ID NO: 21157
  source 1..80: mol_type = other DNA

SEQ ID NO: 108588 - DNA, 80 bp, synthetic construct
  source 1..80: mol_type = other DNA
ttgctcaacattcatccactgaagaatgaatcatcttttcccttcagctagttttttcccttcagctagtttcttcccct

SEQ ID NO: 108589 - DNA, 80 bp, synthetic construct
  source 1..80: mol_type = other DNA
ccatcctagttgaggttattgtctcatgtcttaatagaaacaaaagccattccttatatctacctaaatttcttagatct

SEQ ID NO: 108590 - DNA, 80 bp, synthetic construct
  source 1..80: mol_type = other DNA
atatgtatggaaagccagatttttaatatgtcctttgttgtaaaagttaaaaataaataaatgaacagatctaatctagc

SEQ ID NO: 108591 - DNA, 80 bp, synthetic construct; identical to SEQ ID NO: 21158
  source 1..80: mol_type = other DNA

SEQ ID NO: 108592 - DNA, 80 bp, synthetic construct
  source 1..80: mol_type = other DNA
tgcattggtgtgtcatttttattttagtaaacgcatacacagaatacctcactcttgccttgttcactgtgcttcatcaa

SEQ ID NO: 108593 - DNA, 80 bp, synthetic construct
  source 1..80: mol_type = other DNA
gcccatggcctcaagctcaaatatgaatcaaattttcagatatctcttcattttcctcctcatgaatgcctctaacatga

SEQ ID NO: 108594 - DNA, 80 bp, synthetic construct; identical to SEQ ID NO: 21159
  source 1..80: mol_type = other DNA

SEQ ID NO: 108595 - DNA, 80 bp, synthetic construct
  source 1..80: mol_type = other DNA
ttaccaatattttcgggggtgattctgcatgttgctgggtccaagattaaatacaagagaaaaattttgctcagatgtaa

SEQ ID NO: 108596 - DNA, 80 bp, synthetic construct
  source 1..80: mol_type = other DNA
tcttttattttctaagtgtgttccataaagttttgccacataacaaaggcagaacacttgaacccttccctcatgctttc

SEQ ID NO: 108597 - DNA, 80 bp, synthetic construct
  source 1..80: mol_type = other DNA
atctggaaccccatttttacagttttgatgtttatgaagtaatattgctttaataacattctgatcttctcatgtaacat

SEQ ID NO: 108598 - DNA, 80 bp, synthetic construct
  source 1..80: mol_type = other DNA
ctctgcaaatttggcattactctcagtcatgcttgctccaattactaaataaatacttgaactgtgtattttcattcaac

SEQ ID NO: 108599 - DNA, 80 bp, synthetic construct; identical to SEQ ID NO: 21160
  source 1..80: mol_type = other DNA

SEQ ID NO: 108600 - DNA, 80 bp, synthetic construct
  source 1..80: mol_type = other DNA
aaacatgactgaagcaatttaaatcataagataaagattccaaacactgttttgcctcactgttaactggccatggaata

SEQ ID NO: 108601 - DNA, 80 bp, synthetic construct
  source 1..80: mol_type = other DNA
aaggtcccttagtgactaatgtgagaataaagcctgaaacaaccaatcccaagttcaagcctttgactctaaaatgccct

SEQ ID NO: 108602 - DNA, 80 bp, synthetic construct
  source 1..80: mol_type = other DNA
gtttttctcctttgttcagaatttttcctttaaagaaaaaggatttattaaaaaaaaacttatatgataaacatttaaat

SEQ ID NO: 108603 - DNA, 80 bp, synthetic construct; identical to SEQ ID NO: 21161
  source 1..80: mol_type = other DNA

SEQ ID NO: 108604 - DNA, 80 bp, synthetic construct
  source 1..80: mol_type = other DNA
tgttacataaaataaatattacttgattcataaataattctaattactatagctatttattcagagaaaatatcttttgc

SEQ ID NO: 108605 - DNA, 80 bp, synthetic construct
  source 1..80: mol_type = other DNA
ttgactaaaacaaatggaagaaaagaagaaaataatatgcccaaaaatttcaacaaatgagcaccattctgctcagatgt

SEQ ID NO: 108606 - DNA, 80 bp, synthetic construct
  source 1..80: mol_type = other DNA
tctttatatcctcttaaatcactgatcctaaacaacctcatcacacctaagattctattagagcacggaggtcacacaca

SEQ ID NO: 108607 - DNA, 80 bp, synthetic construct
  source 1..80: mol_type = other DNA
caatggggtttacctctttaataaccttagcctgtcctgggttgggctgtgtgcacatagattgggcatgttttagggtt

SEQ ID NO: 108608 - DNA, 80 bp, synthetic construct; identical to SEQ ID NO: 21162
  source 1..80: mol_type = other DNA

SEQ ID NO: 108609 - DNA, 80 bp, synthetic construct
  source 1..80: mol_type = other DNA
gttcacaaactactacatgatctacatctcaatagaaattaacagtttaaaaccaaatgccttttcagtaagtctgccag

SEQ ID NO: 108610 - DNA, 80 bp, synthetic construct
  source 1..80: mol_type = other DNA
gaggaatcgaccctgagtccatacatgtacaacacaagaaggctgcaccaaatattgtactactgaaaacacattaatcc

SEQ ID NO: 108611 - DNA, 80 bp, synthetic construct; identical to SEQ ID NO: 21163
  source 1..80: mol_type = other DNA

SEQ ID NO: 108612 - DNA, 80 bp, synthetic construct
  source 1..80: mol_type = other DNA
tcagagacaggatggacctagattaaaatgtcagcataattcacttgggggtgttttttcaggaaattatcagagaagtt

SEQ ID NO: 108613 - DNA, 80 bp, synthetic construct
  source 1..80: mol_type = other DNA
caaattgtcatgaatcagatgagccaaatgtttcaatgtcttctgattccacagatatggaacaacctgatttacaaaac

SEQ ID NO: 108614 - DNA, 80 bp, synthetic construct
  source 1..80: mol_type = other DNA
aggtttcacataactttagtggcaaatggactgctacactgtcagcagccagaattggtctttggctaatggacagcagg

SEQ ID NO: 108615 - DNA, 80 bp, synthetic construct
  source 1..80: mol_type = other DNA
ttcaaatacctgaataacatgtaagtctcttacttatagtaacaacaaaataaataagaaagactccccccatctgcagt

SEQ ID NO: 108616 - DNA, 80 bp, synthetic construct; identical to SEQ ID NO: 21164
  source 1..80: mol_type = other DNA

SEQ ID NO: 108617 - DNA, 80 bp, synthetic construct
  source 1..80: mol_type = other DNA
aaatggaacattaagctcagggatctatttcacttttaagatgacgcaaaatctctttttctctttgatcactgattatg

SEQ ID NO: 108618 - DNA, 80 bp, synthetic construct
  source 1..80: mol_type = other DNA
gagaaacaaacaacaaaaaatgaaaatattggaattctacttaagagcatgtttgagataaacattttttcaggattcaa

SEQ ID NO: 108619 - DNA, 80 bp, synthetic construct
  source 1..80: mol_type = other DNA
cagtggcacgatcttggctcactgcaacctccgcctccggagttcaggcaattctcctgcctcagcctcctgagtagccg

SEQ ID NO: 108620 - DNA, 80 bp, synthetic construct; identical to SEQ ID NO: 21165
  source 1..80: mol_type = other DNA

SEQ ID NO: 108621 - DNA, 80 bp, synthetic construct
  source 1..80: mol_type = other DNA
agatagtaccaaaatagagaaaggttaacatttaagctaaaagttgctacatacttgaaagctctaggctaagcctcttg

SEQ ID NO: 108622 - DNA, 80 bp, synthetic construct
  source 1..80: mol_type = other DNA
ctgaagcctgaaagaagggcctatttgcagccagatatgcaaattgcaaaaggtgcacaatgcagaaatatgaataatgt

SEQ ID NO: 108623 - DNA, 80 bp, synthetic construct
  source 1..80: mol_type = other DNA
taacttagcattatagtgtttaattcagaaaaaatttgattatttcacggctactaaaataatctatattttaatctaaa

SEQ ID NO: 108624 - DNA, 80 bp, synthetic construct; identical to SEQ ID NO: 21166
  source 1..80: mol_type = other DNA

SEQ ID NO: 108625 - DNA, 80 bp, synthetic construct
  source 1..80: mol_type = other DNA
ataaaacaacagaatgcaataccatggaagatatgaagtcccatttcttgagatgccagagaaagaaatacctgtcttag

SEQ ID NO: 108626 - DNA, 80 bp, synthetic construct
  source 1..80: mol_type = other DNA
tgattatttattcatttgtattattaagacttatcctggtagtcctccactactataaaataagcattccttttgcattg

SEQ ID NO: 108627 - DNA, 80 bp, synthetic construct
  source 1..80: mol_type = other DNA
ggaaaaactattgcattctccatatgagtgattaatttattgggctaggattgattcagactctaagaaaaatatagtaa

SEQ ID NO: 108628 - DNA, 80 bp, synthetic construct
  source 1..80: mol_type = other DNA
aaaatttcaattttaaaaattaaataaggtctagttgacagggcctctaattttgacagtccccaacatttttggcacca

SEQ ID NO: 108629 - DNA, 80 bp, synthetic construct; identical to SEQ ID NO: 21167
  source 1..80: mol_type = other DNA

SEQ ID NO: 108630 - DNA, 80 bp, synthetic construct
  source 1..80: mol_type = other DNA
ctaatgcccactttacatataaggtagagagagtgctttcctcattaaagggtgtcatagaacagtatgatctaaatata

SEQ ID NO: 108631 - DNA, 80 bp, synthetic construct
  source 1..80: mol_type = other DNA
agtcctctgaaaatataacgtaataagaatagtggaaagaaaaactaagggcaaagactggcttttgtgtaccttgtatc

SEQ ID NO: 108632 - DNA, 80 bp, synthetic construct
  source 1..80: mol_type = other DNA
aaatatgtggcaattatcctcacaaaattacgcagacttcttgagccctttttttcctctacagttctatagatgtcaaa

SEQ ID NO: 108633 - DNA, 80 bp, synthetic construct; identical to SEQ ID NO: 21168
  source 1..80: mol_type = other DNA

SEQ ID NO: 108634 - DNA, 80 bp, synthetic construct
  source 1..80: mol_type = other DNA
ttagttccacccacagtttgcttaggaatgctgtgtgaaaaaatgctaaataaagtgtatggtactctgagttttagaga

SEQ ID NO: 108635 - DNA, 80 bp, synthetic construct
  source 1..80: mol_type = other DNA
tctactaaaaatacaaaaattagctgggtgtgggggtgctcacctgtaattccagctactaggaaggctgaggcaggaga

SEQ ID NO: 108636 - DNA, 80 bp, synthetic construct
  source 1..80: mol_type = other DNA
tgcagagtgaatgacaatgtatcctcctggaattatgaatcaatccagctggagcagaagagtcttgtttgatgttaatg

SEQ ID NO: 108637 - DNA, 80 bp, synthetic construct; identical to SEQ ID NO: 21169
  source 1..80: mol_type = other DNA

SEQ ID NO: 108638 - DNA, 80 bp, synthetic construct
  source 1..80: mol_type = other DNA
caatcaagctatttctgtacttcccttcagtttgggctataacagcacactgtccacctgagcagagctctctgaaacac

SEQ ID NO: 108639 - DNA, 80 bp, synthetic construct
  source 1..80: mol_type = other DNA
atagacttttgtcttagtacattgagcgctactgcatttttgggcaggaaagttacacggcagtgttttgaagagataaa

SEQ ID NO: 108640 - DNA, 80 bp, synthetic construct
  source 1..80: mol_type = other DNA
tacaattttgagatttgtttgacatatacagagaaggaaagaaggctgtttgttcaaataagacagattttggacttgat

SEQ ID NO: 108641 - DNA, 80 bp, synthetic construct; identical to SEQ ID NO: 21170
  source 1..80: mol_type = other DNA

SEQ ID NO: 108642 - DNA, 80 bp, synthetic construct
  source 1..80: mol_type = other DNA
atggaaaagagcatagaaggaagcctacctttagagctgtaaggtggacagtaacaaaatagaagtgagtggaatccatt

SEQ ID NO: 108643 - DNA, 80 bp, synthetic construct
  source 1..80: mol_type = other DNA
aaatggagagaaaaatatggaaaagtctgggaaatgggaagacaattagggtagcaagatcccagaatgtgtgggaagaa

SEQ ID NO: 108644 - DNA, 80 bp, synthetic construct; identical to SEQ ID NO: 21171
  source 1..80: mol_type = other DNA

SEQ ID NO: 108645 - DNA, 80 bp, synthetic construct
  source 1..80: mol_type = other DNA
gtaatacaaatagaaaatagtgagataaaagatagcagttgaagggaggaaaatgggacaagatatttgatattcaaatt

SEQ ID NO: 108646 - DNA, 80 bp, synthetic construct
  source 1..80: mol_type = other DNA
ccacacttgattatttccttctttctgatattggactctcaatcttctccttggactttcataaacattcattaaaagca

SEQ ID NO: 108647 - DNA, 80 bp, synthetic construct
  source 1..80: mol_type = other DNA
tatgttgtttgttatctctaagatgtgtgggaaaatatgcagttagtatttgagatgtaatatcactgaattactgagcc

SEQ ID NO: 108648 - DNA, 80 bp, synthetic construct
  source 1..80: mol_type = other DNA
agtgcagtgatgagatctcaggtaactgcaacctccacttcccaagtacaagtaattcttctgcctcagcctcccaagta

SEQ ID NO: 108649 - DNA, 80 bp, synthetic construct; identical to SEQ ID NO: 21172
  source 1..80: mol_type = other DNA

SEQ ID NO: 108650 - DNA, 80 bp, synthetic construct
  source 1..80: mol_type = other DNA
ttagctggcagcctagtggttctcataatattaatacaagctaaggttactgaatattgacattgcttctggagcccaca

SEQ ID NO: 108651 - DNA, 80 bp, synthetic construct
  source 1..80: mol_type = other DNA
cttatatgcacaaataccatattgagtcaatattcaaatgctggagcaatgtgcatagaagtgtttgagagcaagtgagt

SEQ ID NO: 108652 - DNA, 80 bp, synthetic construct
  source 1..80: mol_type = other DNA
tctccatcatctcaagatggtctgaattccaactaacccatctgaaggcagtagaaatttttataaatatgaactatacg

SEQ ID NO: 108653 - DNA, 80 bp, synthetic construct; identical to SEQ ID NO: 21173
  source 1..80: mol_type = other DNA

SEQ ID NO: 108654 - DNA, 80 bp, synthetic construct
  source 1..80: mol_type = other DNA
acactcattagattacttacactaagaaaaatctcccatctcttgaaaagcaaatggaagcttaacgatagtccctcagt

SEQ ID NO: 108655 - DNA, 80 bp, synthetic construct
  source 1..80: mol_type = other DNA
tgcacagattaaaattttagtcagaaacatttttaagccaagtaaaagccaaaatagaatgatgtaggaccaaagaaaac

SEQ ID NO: 108656 - DNA, 80 bp, synthetic construct; identical to SEQ ID NO: 21174
  source 1..80: mol_type = other DNA

SEQ ID NO: 108657 - DNA, 80 bp, synthetic construct
  source 1..80: mol_type = other DNA
tcatatgcatgtatataaaatgaaaagccaatataatttctaaaaggttttgctgtgactcattgtgatagccatatata

SEQ ID NO: 108658 - DNA, 80 bp, synthetic construct
  source 1..80: mol_type = other DNA
tagaagggtttcaaggtttactgattcaaaaacaaaaattgtcgtctttatctctgtgctctccccttgctccaagcctg

SEQ ID NO: 108659 - DNA, 80 bp, synthetic construct
  source 1..80: mol_type = other DNA
ccaagcttaggtgggggtggggtgggggaaatttttatttgaatgaaagttgggagctttgataatatactggattggat

SEQ ID NO: 108660 - DNA, 80 bp, synthetic construct
  source 1..80: mol_type = other DNA
accaaccaaaccgaacgaaacatgttttattaactctgtgcatacagaaacagagtcagggctcttccccatgcccttac

SEQ ID NO: 108661 - DNA, 80 bp, synthetic construct; identical to SEQ ID NO: 21175
  source 1..80: mol_type = other DNA

SEQ ID NO: 108662 - DNA, 80 bp, synthetic construct
  source 1..80: mol_type = other DNA
aaaaaagcatggcaatatttttttttgtaaaaattaatcttaaggaaggtaaaagtaaggtctctgccttttataattgc

SEQ ID NO: 108663 - DNA, 80 bp, synthetic construct
  source 1..80: mol_type = other DNA
tgggtttaaatcttgctccaccaatttctaattgtgtggcattggtgaatcattcaacagctctcttcctcagtttccca

SEQ ID NO: 108664 - DNA, 80 bp, synthetic construct; identical to SEQ ID NO: 21176
  source 1..80: mol_type = other DNA

SEQ ID NO: 108665 - DNA, 80 bp, synthetic construct
  source 1..80: mol_type = other DNA
cctgaggtcaggagtttgagaccagcctggtcaacatggagaaaccctgtctctactaaaaatacaaaaattagctgggc

SEQ ID NO: 108666 - DNA, 80 bp, synthetic construct
  source 1..80: mol_type = other DNA
tttggcaacatacgtatataaattaatttccatactcgaccgtcccagaagtacccattcgaattccttgtttaaattta

SEQ ID NO: 108667 - DNA, 80 bp, synthetic construct
  source 1..80: mol_type = other DNA
caaaagcagctcagggtcaaataacactggagagcactgcatacaaaatgttaccctcctaagactttacaatatactta

SEQ ID NO: 108668 - DNA, 80 bp, synthetic construct
  source 1..80: mol_type = other DNA
ccttgcttctctttcacactaactacaataataatatcatatagtcacttagtgatttatttaacagatgtgtcttgaaa

SEQ ID NO: 108669 - DNA, 80 bp, synthetic construct; identical to SEQ ID NO: 21177
  source 1..80: mol_type = other DNA

SEQ ID NO: 108670 - DNA, 80 bp, synthetic construct
  source 1..80: mol_type = other DNA
tttgaacacaagcatgacattcacttcacaaaatgtgccttgctctgtcagttaaaacagataatgtaatttacacacac

SEQ ID NO: 108671 - DNA, 80 bp, synthetic construct
  source 1..80: mol_type = other DNA
taacaactggtattcaaacaaaggggaggtggagagaggaggataaggatttgaacaaagaaggctctgaaataatcata

SEQ ID NO: 108672 - DNA, 80 bp, synthetic construct
  source 1..80: mol_type = other DNA
actcttcaattaagactttatcctagggacaaagtaaagctttggcaggtttaagtggagagtgaaataatcagacatgc

SEQ ID NO: 108673 - DNA, 80 bp, synthetic construct; identical to SEQ ID NO: 21178
  source 1..80: mol_type = other DNA

SEQ ID NO: 108674 - DNA, 80 bp, synthetic construct
  source 1..80: mol_type = other DNA
atatatttattgtgtatccacaataagtgactagggaatttatgacagcaacagcaacaaataaacatagggtcagtgaa

SEQ ID NO: 108675 - DNA, 80 bp, synthetic construct
  source 1..80: mol_type = other DNA
ctttgagggtgaaatagaatgtgtaattaaaaggaagacagagatgaaagtctgaatctttccaaaggttgtagccttta

SEQ ID NO: 108676 - DNA, 80 bp, synthetic construct; identical to SEQ ID NO: 21179
  source 1..80: mol_type = other DNA

SEQ ID NO: 108677 - DNA, 80 bp, synthetic construct
  source 1..80: mol_type = other DNA
tggggttacaggtgcccgccaccacgcccagctaatttttgtatttttagtagagacgagctttctccgtgttggcaggg

SEQ ID NO: 108678 - DNA, 80 bp, synthetic construct
  source 1..80: mol_type = other DNA
caaataaagggtccttcaagcaacaggatgagtgtgaatatcaaaaggagagtttgcgaatagaggctgaagagaactga

SEQ ID NO: 108679 - DNA, 80 bp, synthetic construct
  source 1..80: mol_type = other DNA
agtgggagggaacctgggaaagggcagtgaagagtagcctgaggatattaaatagcaaagatacccaatacttaatctgt

SEQ ID NO: 108680 - DNA, 80 bp, synthetic construct
  source 1..80: mol_type = other DNA
taaagaaaagtgcttttatggaaaaaaacaaaaggccagcatacagagaattaagaagccagtccatgagctgaaccaag

SEQ ID NO: 108681 - DNA, 80 bp, synthetic construct; identical to SEQ ID NO: 21180
  source 1..80: mol_type = other DNA

SEQ ID NO: 108682 - DNA, 80 bp, synthetic construct
  source 1..80: mol_type = other DNA
cttcccaagtctatattattggaaaacaagggaaatgggtgggagctggggagaacatggtaaatttaaagattaggcag

SEQ ID NO: 108683 - DNA, 80 bp, synthetic construct
  source 1..80: mol_type = other DNA
cagacataagatatttctaccaatataggaagtttaattggatagtgctggaagaccatcatcacattttaagaaatgtc

SEQ ID NO: 108684 - DNA, 80 bp, synthetic construct; identical to SEQ ID NO: 21181
  source 1..80: mol_type = other DNA

SEQ ID NO: 108685 - DNA, 80 bp, synthetic construct
  source 1..80: mol_type = other DNA
tagctaatttagaccttgacagcttccagcagattggaatccccaaaaaatatctaaaatgttcaataattctctgtgtt

SEQ ID NO: 108686 - DNA, 80 bp, synthetic construct
  source 1..80: mol_type = other DNA
gtttggaatccatgtaatgtgattctgtgaaaaggtcatttaatggtttcatctttctgttctcaacaaattcccagtgt

SEQ ID NO: 108687 - DNA, 80 bp, synthetic construct
  source 1..80: mol_type = other DNA
cagtctctcagtctgaatcttggactcaatgtcctgtgattgctcccaaaacaattatcaaaaacacttcaatttcagag

SEQ ID NO: 108688 - DNA, 80 bp, synthetic construct; identical to SEQ ID NO: 21182
  source 1..80: mol_type = other DNA

SEQ ID NO: 108689 - DNA, 80 bp, synthetic construct
  source 1..80: mol_type = other DNA
gctttgaagatgtgcttgcctattataacagacatgtcaaaaaccattgacaaatcatgaataggcttcttacagataaa

SEQ ID NO: 108690 - DNA, 80 bp, synthetic construct
  source 1..80: mol_type = other DNA
gttttctcttgcattcagcccattttcttaccttttaatcacacatcagaaggcaccttttcaaatgctttgctacacat

SEQ ID NO: 108691 - DNA, 80 bp, synthetic construct
  source 1..80: mol_type = other DNA
cctttaagttccaattaataatactttccgaaatattgatcaaggttaaccttaaggttactaaatcctttctattgaga

SEQ ID NO: 108692 - DNA, 80 bp, synthetic construct; identical to SEQ ID NO: 21183
  source 1..80: mol_type = other DNA

SEQ ID NO: 108693 - DNA, 80 bp, synthetic construct
  source 1..80: mol_type = other DNA
ttggaagcaggaaaatggaattgccattctgagagttaagtcttaaaacacacattacattttaggggaaaaaccactat

SEQ ID NO: 108694 - DNA, 80 bp, synthetic construct
  source 1..80: mol_type = other DNA
atcttttgattattgctggaaaatgagtaccctaggattattactgatttcattctcctaggtaaaaatgtaatgataat

SEQ ID NO: 108695 - DNA, 80 bp, synthetic construct
  source 1..80: mol_type = other DNA
atctactctgtgccagatgccactctaggctctgtgaacacaattattaaacactcagaggcttgtccttttgtagcttt

SEQ ID NO: 108696 - DNA, 80 bp, synthetic construct
  source 1..80: mol_type = other DNA
gaacagtgcttactacaaataaggaattcaactaaatgcttattgagtgatcaggctgaactatccttacaaactagtta

SEQ ID NO: 108697 - DNA, 80 bp, synthetic construct; identical to SEQ ID NO: 21184
  source 1..80: mol_type = other DNA

SEQ ID NO: 108698 - DNA, 80 bp, synthetic construct
  source 1..80: mol_type = other DNA
cataaccacaaatatcacaataaaaagaaaatgatgtggtctctctctggattcaagaatactactgttgtagagaccta

SEQ ID NO: 108699 - DNA, 80 bp, synthetic construct
  source 1..80: mol_type = other DNA
gacaaaaataactactgggctaaactaaaagattcctcaaagcacagaacaacatcagcgaatactttagtcgagtttcc

SEQ ID NO: 108700 - DNA, 80 bp, synthetic construct
  source 1..80: mol_type = other DNA
tgacgttcacaactacgaccaccagatggcactagtcttatccttttctgaagagaatttcatatgcaaaattcagtgac

SEQ ID NO: 108701 - DNA, 80 bp, synthetic construct
  source 1..80: mol_type = other DNA
taaaatgatctgtactcaggccctttgaaagcatcagacctcactcaggataatatcttttgtgatccagatctccacaa

SEQ ID NO: 108702 - DNA, 80 bp, synthetic construct; identical to SEQ ID NO: 21185
  source 1..80: mol_type = other DNA

SEQ ID NO: 108703 - DNA, 80 bp, synthetic construct
  source 1..80: mol_type = other DNA
atgatttgtctccttcactggactatgaagttctataaatgcaaaaactttgtctccttgtcaccattattcttttcctc

SEQ ID NO: 108704 - DNA, 80 bp, synthetic construct
  source 1..80: mol_type = other DNA
gcctagctaattttttgtatttttaatagagatggggcttcaccatattggccaggctggacttgagctcctgaccttag

SEQ ID NO: 108705 - DNA, 80 bp, synthetic construct
  source 1..80: mol_type = other DNA
agaatcattaagtctatacaaatcatttctcaagaatgaggatttgcataccaccaaggtcactctcagtcctgcatctc

SEQ ID NO: 108706 - DNA, 80 bp, synthetic construct; identical to SEQ ID NO: 21186
  source 1..80: mol_type = other DNA

SEQ ID NO: 108707 - DNA, 80 bp, synthetic construct
  source 1..80: mol_type = other DNA
aagaggtttcttttttcctcattcccccacgtatccttgcccttttgtactgtaaattgcacaagctggcatttaaatgc

SEQ ID NO: 108708 - DNA, 80 bp, synthetic construct
  source 1..80: mol_type = other DNA
ctctccggtttctcatatcacagtatttgccctgtggacaaagaagaagtagccaaaggagcactttccttctgacagag

SEQ ID NO: 108709 - DNA, 80 bp, synthetic construct
  source 1..80: mol_type = other DNA
ctatttttgtcaagggctaactccacattttgcttatttggctctcacaattaaaattactcatccaggactgggtaagt

SEQ ID NO: 108710 - DNA, 80 bp, synthetic construct; identical to SEQ ID NO: 21187
  source 1..80: mol_type = other DNA

SEQ ID NO: 108711 - DNA, 80 bp, synthetic construct
  source 1..80: mol_type = other DNA
ttttttcctgctccaacataggcaatgataccatacaacatactttcatcccaaacactggcaccctaaaagcagtgatt

SEQ ID NO: 108712 - DNA, 80 bp, synthetic construct
  source 1..80: mol_type = other DNA
ctctttcctctacactcaacccccaaccccaacataaagccactgactccattccatcttctcggtttataaagaaaaag

SEQ ID NO: 108713 - DNA, 80 bp, synthetic construct
  source 1..80: mol_type = other DNA
tgatgagtgttttgcttacctggcagaagagaatcacccaaggatcatttttaaaatacagttgtctttcttatccttgc

SEQ ID NO: 108714 - DNA, 80 bp, synthetic construct; identical to SEQ ID NO: 21188
  source 1..80: mol_type = other DNA

SEQ ID NO: 108715 - DNA, 80 bp, synthetic construct
  source 1..80: mol_type = other DNA
ggttaagcagaagtcagcatagtgaattagtttccatgatggagttgctttagcctttacacatgcataattttttaaaa

SEQ ID NO: 108716 - DNA, 80 bp, synthetic construct
  source 1..80: mol_type = other DNA
aattttttaattgtttatagacagggggcgggtctcactatgttgcccaggctggtctcaaactcctagtctcaagtgat

SEQ ID NO: 108717 - DNA, 80 bp, synthetic construct; identical to SEQ ID NO: 21189
  source 1..80: mol_type = other DNA

SEQ ID NO: 108718 - DNA, 80 bp, synthetic construct
  source 1..80: mol_type = other DNA
gtgaatattgacacaaatggtcaaaccacaggaaaaaggggatcctgaagttttaaggagttaatgcaagcaaagtgctc

SEQ ID NO: 108719 - DNA, 80 bp, synthetic construct
  source 1..80: mol_type = other DNA
ctttcataaagtttagaaatgactgtcctctgacatgcactagtggtaaaagatggcagctgaaatacaagcagcctttc

SEQ ID NO: 108720 - DNA, 80 bp, synthetic construct
  source 1..80: mol_type = other DNA
tgaaaagctaattaagactccacatacagcagaggagactgggaatacaatatttagtttttctctacatgaccacagtg

SEQ ID NO: 108721 - DNA, 80 bp, synthetic construct; identical to SEQ ID NO: 21190
  source 1..80: mol_type = other DNA

SEQ ID NO: 108722 - DNA, 80 bp, synthetic construct
  source 1..80: mol_type = other DNA
acagaacggtatctatttccctctgattctttcttttttctaacaacattcttcttccagttaaaagagaggaaacagca

SEQ ID NO: 108723 - DNA, 80 bp, synthetic construct
  source 1..80: mol_type = other DNA
tggattaggccctccttacctgtcaccagcattgttgtaattgacttgagctctgtaatatttattgatataactttcta

SEQ ID NO: 108724 - DNA, 80 bp, synthetic construct
  source 1..80: mol_type = other DNA
cctgataggaatatcaggatctttcttcccaatttcatttcccactgtctctgctgttctctcttcatactcgacctgaa

SEQ ID NO: 108725 - DNA, 80 bp, synthetic construct; identical to SEQ ID NO: 21191
  source 1..80: mol_type = other DNA

SEQ ID NO: 108726 - DNA, 80 bp, synthetic construct
  source 1..80: mol_type = other DNA
acttcagcctacagagaaaggtcacatctcaaaaaaaagaaatatttccaagaaaacaataaaaataacacaacaataaa

SEQ ID NO: 108727 - DNA, 80 bp, synthetic construct
  source 1..80: mol_type = other DNA
acatccttggattttggtattcctgaggcatcttggaaccagtcgctgggacgtaactgtattcagttctgcccacacat

SEQ ID NO: 108728 - DNA, 80 bp, synthetic construct
  source 1..80: mol_type = other DNA
aagcaggaaagcttagttaagggagatgggaaaagttatgggagatgggaaaagagagattcagagagagagccatgata

SEQ ID NO: 108729 - DNA, 80 bp, synthetic construct
  source 1..80: mol_type = other DNA
attattgaatggaatcattgctgctcacaatttatacaagtagtaatttaggtcaaagtggttaaataaaatggggcaag

SEQ ID NO: 108730 - DNA, 80 bp, synthetic construct; identical to SEQ ID NO: 21192
  source 1..80: mol_type = other DNA

SEQ ID NO: 108731 - DNA, 80 bp, synthetic construct
  source 1..80: mol_type = other DNA
aatgccatcttttcacattaaacattttaaaaaacagaagttaaagctcagaataaaattaaaagaagcatttgaatttt

SEQ ID NO: 108732 - DNA, 80 bp, synthetic construct
  source 1..80: mol_type = other DNA
ttcactctctaaaccagctaccaaaataggtatatttaaacatttatcagagaagttattttcctcctataagaagtcgt

SEQ ID NO: 108733 - DNA, 80 bp, synthetic construct
  source 1..80: mol_type = other DNA
aactaacttagacaaaatgaggaattaattaaatcatgtaatgtaatgtcaggaggtcaggggaatagtactttccaggg

SEQ ID NO: 108734 - DNA, 80 bp, synthetic construct; identical to SEQ ID NO: 21193
  source 1..80: mol_type = other DNA

SEQ ID NO: 108735 - DNA, 80 bp, synthetic construct
  source 1..80: mol_type = other DNA
ttgattcagtctttcagtaggcaagactatgagtttttaatcatcgtatttatataccctacctggccacattcgaaggc

SEQ ID NO: 108736 - DNA, 80 bp, synthetic construct
  source 1..80: mol_type = other DNA
gccttctcatcaaggctaaatcctttctatagagaccattttacagcaaagttgaagtcacggctcttttcatatgcatt

SEQ ID NO: 108737 - DNA, 80 bp, synthetic construct; identical to SEQ ID NO: 21194
  source 1..80: mol_type = other DNA

SEQ ID NO: 108738 - DNA, 80 bp, synthetic construct
  source 1..80: mol_type = other DNA
atcaacctgggtgcctaagtggctatgatgagtacagcaggtttcccaacttgtgcatgaagaagaaaaaacgttctcat

SEQ ID NO: 108739 - DNA, 80 bp, synthetic construct
  source 1..80: mol_type = other DNA
tttaataatgaattaaggaagagaaataatggagtcagcagtggctagagagatttaagcctggggaaaaaagggtgtag

SEQ ID NO: 108740 - DNA, 80 bp, synthetic construct
  source 1..80: mol_type = other DNA
ctggatatttaaatggagatggtgaataggcaattggatagatgaaggtgtgattttggagttcagtgagaggccccagt

SEQ ID NO: 108741 - DNA, 80 bp, synthetic construct
  source 1..80: mol_type = other DNA
gggattccagaaagaaagggaggaagccagcaaaagaaaacaagagagtgaccagagaacttaaaaggaaagaatgttgt

SEQ ID NO: 108742 - DNA, 80 bp, synthetic construct; identical to SEQ ID NO: 21195
  source 1..80: mol_type = other DNA

SEQ ID NO: 108743 - DNA, 80 bp, synthetic construct
  source 1..80: mol_type = other DNA
ggagtgatgctccttagttagcaggtggggaaggcatactgtgcaccagtggaaggatttttcatagaagtatgaacatt

SEQ ID NO: 108744 - DNA, 80 bp, synthetic construct
  source 1..80: mol_type = other DNA
atagagaagaagggtaaaaaggtaaaggagttttaaaaaaggaacagtttggagagagtagtctcagaaaagagagagtg

SEQ ID NO: 108745 - DNA, 80 bp, synthetic construct; identical to SEQ ID NO: 21196
  source 1..80: mol_type = other DNA

SEQ ID NO: 108746 - DNA, 80 bp, synthetic construct
  source 1..80: mol_type = other DNA
tacttcatctgttagcattagctacttcatcatttttgaccttatattccaaaattaatatagctaaccggatatgtgca

SEQ ID NO: 108747 - DNA, 80 bp, synthetic construct
  source 1..80: mol_type = other DNA
tatggtctagaaaccatttttccctattttttgcattataaataattattaaactttctttcctaccttaggcttattgt

SEQ ID NO: 108748 - DNA, 80 bp, synthetic construct
  source 1..80: mol_type = other DNA
ctggaataggcagtcagaagagatggtgtcagctcaggttatatatagtgaacatttactatggcctcacttcctggaat

SEQ ID NO: 108749 - DNA, 80 bp, synthetic construct
  source 1..80: mol_type = other DNA
ttttgaaaaaatagcatcttgtaagtcttcttaaatgtaatgtaatccttcttcttacaggattacctccacaaattcaa

SEQ ID NO: 108750 - DNA, 80 bp, synthetic construct; identical to SEQ ID NO: 21197
  source 1..80: mol_type = other DNA

SEQ ID NO: 108751 - DNA, 80 bp, synthetic construct
  source 1..80: mol_type = other DNA
tgcttttgttgatcacactgctttattctatgttgggttggttttctaaaatacttaagtatcccctccatagatgacac

SEQ ID NO: 108752 - DNA, 80 bp, synthetic construct
  source 1..80: mol_type = other DNA
ctagtccatctcatcattttttaaacctaatctagggaatcatcacccaatccaatttcagctcgaatgttttggacaaa

SEQ ID NO: 108753 - DNA, 80 bp, synthetic construct
  source 1..80: mol_type = other DNA
aaaggttagttcaggaatgggcctatgaagactgatactgctcaagtttttatttgacctttcaggacactgatctattc

SEQ ID NO: 108754 - DNA, 80 bp, synthetic construct; identical to SEQ ID NO: 21198
  source 1..80: mol_type = other DNA

SEQ ID NO: 108755 - DNA, 80 bp, synthetic construct
  source 1..80: mol_type = other DNA
ggtggtgtccctgttctagatctctaatagtcactcacctaccacaaaagagaagtaatttctatacttctgccttgatt

SEQ ID NO: 108756 - DNA, 80 bp, synthetic construct
  source 1..80: mol_type = other DNA
tttttgagtgaatgaatgaaggaaagcataatttctacaagaaaagtaagagtcagacctacaggatctcttctgcattt

SEQ ID NO: 108757 - DNA, 80 bp, synthetic construct
  source 1..80: mol_type = other DNA
tttggtgactttcatactgacttcactctacttactggtgatgatgggcaagtaatttacctattccaatgctgggtttc

SEQ ID NO: 108758 - DNA, 80 bp, synthetic construct; identical to SEQ ID NO: 21199
  source 1..80: mol_type = other DNA

SEQ ID NO: 108759 - DNA, 80 bp, synthetic construct
  source 1..80: mol_type = other DNA
agattaaaaaataactggtgtctaactgacattccatttcttatgccactctgtgtcattttcccaggaaaatttatgat

SEQ ID NO: 108760 - DNA, 80 bp, synthetic construct
  source 1..80: mol_type = other DNA
tatgtggtctatttactgatatttactgattcttctttatatgcatttcaattctccctgttgaaagaacttaataaaag

SEQ ID NO: 108761 - DNA, 80 bp, synthetic construct; identical to SEQ ID NO: 21200
  source 1..80: mol_type = other DNA

SEQ ID NO: 108762 - DNA, 80 bp, synthetic construct
  source 1..80: mol_type = other DNA
gagaccaccctggctaacacggtgaaaccccgtctctactaaaactacaaaaaattagccaagcatggtggcatgtgcct

SEQ ID NO: 108763 - DNA, 80 bp, synthetic construct
  source 1..80: mol_type = other DNA
cctctcaagttcagaggtgatcttgtttttgtcctcagagagggtagccccaagtccccaaaataagcattaaaaagatt

SEQ ID NO: 108764 - DNA, 80 bp, synthetic construct
  source 1..80: mol_type = other DNA
cattcagcccaagctcacttttgtattgttcaaaccaaaagtgaatatgtgaaaagttatctcagatattcccacaataa

SEQ ID NO: 108765 - DNA, 80 bp, synthetic construct
  source 1..80: mol_type = other DNA
taagttccatgattataaaacacttgaaaatatactctctttccttcaaagcccttcgagcatagccagtgtttttaaca

SEQ ID NO: 108766 - DNA, 80 bp, synthetic construct; identical to SEQ ID NO: 21201
  source 1..80: mol_type = other DNA

SEQ ID NO: 108767 - DNA, 80 bp, synthetic construct
  source 1..80: mol_type = other DNA
atttcaatgtctaacaataccaattggatgcatttgttaaatcttgcccaaatacatatttgcaaaactccagaaaaaag

SEQ ID NO: 108768 - DNA, 80 bp, synthetic construct
  source 1..80: mol_type = other DNA
tgtccaattataaatgtacacataaatatttaaaataggtttcttttagttacatgtaaatgtagaaatttaagtgatct

SEQ ID NO: 108769 - DNA, 80 bp, synthetic construct
  source 1..80: mol_type = other DNA
aagcttctgtaaaggactctttgcaatttctcaatgagaaaagcagattttgtagagagaaagcaaatagccaaaggttt

SEQ ID NO: 108770 - DNA, 80 bp, synthetic construct; identical to SEQ ID NO: 21202
  source 1..80: mol_type = other DNA

SEQ ID NO: 108771 - DNA, 80 bp, synthetic construct
  source 1..80: mol_type = other DNA
gcatgcctctcttttaaggcaatctgcatagaatcctagtcataatttgaaaacatcaactttttaaatatcacagcacc

SEQ ID NO: 108772 - DNA, 80 bp, synthetic construct
  source 1..80: mol_type = other DNA
ttaaagcaaaactagacaaaacacaaaagactttactcctcctacagccgtaatccttcccccttccccgcaaaatctac

SEQ ID NO: 108773 - DNA, 80 bp, synthetic construct
  source 1..80: mol_type = other DNA
aataccaagctcttaacttttcctttaatatctctggcaatttctttcagcctctcttgctttattttccaccattgaat

SEQ ID NO: 108774 - DNA, 80 bp, synthetic construct; identical to SEQ ID NO: 21203
  source 1..80: mol_type = other DNA

SEQ ID NO: 108775 - DNA, 80 bp, synthetic construct
  source 1..80: mol_type = other DNA
cccaccccaacgcattatattctatcattgccttaagtttattttctccactgcccttactcagagttgaacttgtggac

SEQ ID NO: 108776 - DNA, 80 bp, synthetic construct
  source 1..80: mol_type = other DNA
aatgaatgaacacattcatttttttctagtagcttatttcagaaaagctatgtggttttaatatccttcttgtaatttat

SEQ ID NO: 108777 - DNA, 80 bp, synthetic construct; identical to SEQ ID NO: 21204
  source 1..80: mol_type = other DNA

SEQ ID NO: 108778 - DNA, 80 bp, synthetic construct
  source 1..80: mol_type = other DNA
ggtgaagagcaacataaacttcaggtaagtgtgccttgtgaacacttggaattgccaaatttgatcatattgcttagttg

SEQ ID NO: 108779 - DNA, 80 bp, synthetic construct
  source 1..80: mol_type = other DNA
tttcactccactttcacttgagaaaattggaatgcatcttacagactcacttgcagccagagttctggagacatatcaag

SEQ ID NO: 108780 - DNA, 80 bp, synthetic construct
  source 1..80: mol_type = other DNA
tgaatgatttggcaaatgaagatgttagtaatctgctgaggcttgcctcaacatttccaggatctagtctttgtggttgt

SEQ ID NO: 108781 - DNA, 80 bp, synthetic construct
  source 1..80: mol_type = other DNA
actcagttccctgtatagaatgtcttctagcagtgccaactacagtgtttagtgtttctagcactgaagtctaatacaaa

SEQ ID NO: 108782 - DNA, 80 bp, synthetic construct
  source 1..80: mol_type = other DNA
ttgccatggatgatttcaaatatacactaaataaaggagtgttataattaaccccaatataccaattgctcagtttcaac

SEQ ID NO: 108783 - DNA, 80 bp, synthetic construct; identical to SEQ ID NO: 21205
  source 1..80: mol_type = other DNA

SEQ ID NO: 108784 - DNA, 80 bp, synthetic construct
  source 1..80: mol_type = other DNA
gccttataaatttgctatttggggctacagtagtgagatcatatgctctgccatgttcctctactttaggaagaaatgac

SEQ ID NO: 108785 - DNA, 80 bp, synthetic construct
  source 1..80: mol_type = other DNA
catgaaaatataaagaattattaaaccctaaaaagaaacgagttaaaaactagcactaactgaaactcaatctctctgtc

SEQ ID NO: 108786 - DNA, 80 bp, synthetic construct; identical to SEQ ID NO: 21206
  source 1..80: mol_type = other DNA

SEQ ID NO: 108787 - DNA, 80 bp, synthetic construct
  source 1..80: mol_type = other DNA
gtggcaggggagtatcagattttcccatgaaccattgcacataaacaagtttcatcatttccctcaaaaagctaaaacca

SEQ ID NO: 108788 - DNA, 80 bp, synthetic construct
  source 1..80: mol_type = other DNA
aaaattgatggcaaggaagaagtatcttggtttatctttacccctcaatcatgtaattttcacaaatccactgctctaag

SEQ ID NO: 108789 - DNA, 80 bp, synthetic construct
  source 1..80: mol_type = other DNA
caaaggaatgggcaatcaactcttggacacacagaatgtctggctgatccttcttgctcatttcatgggccacataatca

SEQ ID NO: 108790 - DNA, 80 bp, synthetic construct; identical to SEQ ID NO: 21207
  source 1..80: mol_type = other DNA

SEQ ID NO: 108791 - DNA, 80 bp, synthetic construct
  source 1..80: mol_type = other DNA
taatagctgagaggaattaggtttttaccccatatacacaagccctagaagatctgcattttaataggggacgattcctt

SEQ ID NO: 108792 - DNA, 80 bp, synthetic construct
  source 1..80: mol_type = other DNA
gaatgcttatcaccaaaccataatacttgagatgattgtcttttccatgtaaacttaagcctaacctgaatcgaagccaa

SEQ ID NO: 108793 - DNA, 80 bp, synthetic construct
  source 1..80: mol_type = other DNA
gttcattgtatcttgaccaaggtggtcctcaccttgattaaactttaataggtttctttctgaccttcagcagctcctaa

SEQ ID NO: 108794 - DNA, 80 bp, synthetic construct; identical to SEQ ID NO: 21208
  source 1..80: mol_type = other DNA

SEQ ID NO: 108795 - DNA, 80 bp, synthetic construct
  source 1..80: mol_type = other DNA
aagtttacgttttgagggggaaaagccaatatgcaaaaacagatgtcctgtgattccccataccagccattacaaacatt

SEQ ID NO: 108796 - DNA, 80 bp, synthetic construct
  source 1..80: mol_type = other DNA
atttgtgtatgttgcatgaggagtctttcatgaagcaaacatcctgaacgtaatccatctaaggaaacaaagaaagtgca

SEQ ID NO: 108797 - DNA, 80 bp, synthetic construct; identical to SEQ ID NO: 21209
  source 1..80: mol_type = other DNA

SEQ ID NO: 108798 - DNA, 80 bp, synthetic construct
  source 1..80: mol_type = other DNA
gaggtcaccagaaccatgtcaaaagttctgaaatctctgaagttcacttgggacatcagataaattatttgaaaacaacc

SEQ ID NO: 108799 - DNA, 80 bp, synthetic construct
  source 1..80: mol_type = other DNA
ctcttaagaaagaaaaaataatcacagtagtaattttcaaaaagtgtttaggattgaattctctttttaaaaattgacaa

SEQ ID NO: 108800 - DNA, 80 bp, synthetic construct
  source 1..80: mol_type = other DNA
cctacctttcttttttgtttcagaagtaactttcttctcagccttcttcttttccccttctttttctagagaatacattt

SEQ ID NO: 108801 - DNA, 80 bp, synthetic construct; identical to SEQ ID NO: 21210
  source 1..80: mol_type = other DNA

SEQ ID NO: 108802 - DNA, 80 bp, synthetic construct
  source 1..80: mol_type = other DNA
tcattagaaataatatattagaccattaaaaaggtatcttttgatgtagctgtttttcatatctggctcttgccaacagg

SEQ ID NO: 108803 - DNA, 80 bp, synthetic construct
  source 1..80: mol_type = other DNA
catttaagcctgatgacaagtgtctggcagtgtgttggaaacataacttccacggtcctttctgagtggttgtatcaaca

SEQ ID NO: 108804 - DNA, 80 bp, synthetic construct
  source 1..80: mol_type = other DNA
tagccacatagcaggtggacatccctggacacttttctggtaagcataatcattttagataacaaagtcctgtactaata

SEQ ID NO: 108805 - DNA, 80 bp, synthetic construct
  source 1..80: mol_type = other DNA
aattcctttctctttgtcagttgtctctcatctcaggtacaggtacattcaaagacttccgttacccagaactattataa

SEQ ID NO: 108806 - DNA, 80 bp, synthetic construct; identical to SEQ ID NO: 21211
  source 1..80: mol_type = other DNA

SEQ ID NO: 108807 - DNA, 80 bp, synthetic construct
  source 1..80: mol_type = other DNA
aattctgaatgaagatactttcaagtatcactactttcagcttctctgggagaaattttatgtagtagtgaattttacat

SEQ ID NO: 108808 - DNA, 80 bp, synthetic construct
  source 1..80: mol_type = other DNA
ctcaagctaaacactaatgccatactaaccataagatcagaactcagtatccaagtctccaagtttcataaggttgatga

SEQ ID NO: 108809 - DNA, 80 bp, synthetic construct
  source 1..80: mol_type = other DNA
tatagctggaattttattgtggtgatacagtattcttgtcttcgtccaaattgaattaatgctcctattatacactctgc

SEQ ID NO: 108810 - DNA, 80 bp, synthetic construct
  source 1..80: mol_type = other DNA
tcaagattctacatttcctcaagcactattgtctctgttatataggtgatttggtagcaatggaattaaatttttcactt

SEQ ID NO: 108811 - DNA, 80 bp, synthetic construct; identical to SEQ ID NO: 21212
  source 1..80: mol_type = other DNA

SEQ ID NO: 108812 - DNA, 80 bp, synthetic construct
  source 1..80: mol_type = other DNA
tgtggttgggaaagaaatcttccctacaatgagcagctctgagccacaaatatgttattagcttctgcataaattaacat

SEQ ID NO: 108813 - DNA, 80 bp, synthetic construct
  source 1..80: mol_type = other DNA
aacaaatgcaaaatgttttatttttgtcttatgttttgttcctcccctctttgcccttctagtgtagagattatcctaat

SEQ ID NO: 108814 - DNA, 80 bp, synthetic construct; identical to SEQ ID NO: 21213
  source 1..80: mol_type = other DNA

SEQ ID NO: 108815 - DNA, 80 bp, synthetic construct
  source 1..80: mol_type = other DNA
gctatggcacaccgaatttcattttcctcatttgaaaagtggagctaataaaatctacctcacgcttgtaatcccagcac

SEQ ID NO: 108816 - DNA, 80 bp, synthetic construct
  source 1..80: mol_type = other DNA
taaaaatacaaaaaaaaattagccgggcgtgatggtgggcgcctgtagtcccagctactcgggaggctgaggcaggagaa

SEQ ID NO: 108817 - DNA, 80 bp, synthetic construct
  source 1..80: mol_type = other DNA
taccttgcttacttgtgagaaatggagataactgggctaaaatgcctggaacagagtagatgtagaaaaataatgataat

SEQ ID NO: 108818 - DNA, 80 bp, synthetic construct
  source 1..80: mol_type = other DNA
attaagaaactaaagggaaaaaaatacccataagcaagacagaaacatgttatgaagggtactgtactgcaatgaagtgg

SEQ ID NO: 108819 - DNA, 80 bp, synthetic construct; identical to SEQ ID NO: 21214
  source 1..80: mol_type = other DNA

SEQ ID NO: 108820 - DNA, 80 bp, synthetic construct
  source 1..80: mol_type = other DNA
ttttgaaaattaaagcctgagaccataggaggtggcttggtttttaaaaggtggatcagggtaaacctttctgaatgggc

SEQ ID NO: 108821 - DNA, 80 bp, synthetic construct
  source 1..80: mol_type = other DNA
tctcagcactttgggaggctgaggcaggtggatcacgaggtcaggagatcgagaccatcctggctaacaaggggaaatcc

SEQ ID NO: 108822 - DNA, 80 bp, synthetic construct
  source 1..80: mol_type = other DNA
cctttccccattgcttgtttttctcaggtttgtcaaagatcagatagttatagatatgcggcgttatttctgagggctct

SEQ ID NO: 108823 - DNA, 80 bp, synthetic construct
  source 1..80: mol_type = other DNA
atatgaactttaaagtagttttttccaattctgtgaagaaagtcattggtagcttgatggggatggcattgaatctgtaa

SEQ ID NO: 108824 - DNA, 80 bp, synthetic construct; identical to SEQ ID NO: 21215
  source 1..80: mol_type = other DNA

SEQ ID NO: 108825 - DNA, 80 bp, synthetic construct
  source 1..80: mol_type = other DNA
gaataccatttatttccttctcctgcctaattgccctggccagaacttccaacactatgttgaataggagtggtgagaga

SEQ ID NO: 108826 - DNA, 80 bp, synthetic construct
  source 1..80: mol_type = other DNA
gaatttgtcaaaggccttttctgcatctattgagataattatgtggtttttgtctttggctctgtttatatgctggatta

SEQ ID NO: 108827 - DNA, 80 bp, synthetic construct
  source 1..80: mol_type = other DNA
ctcttttttggttgtgtctctgccaggctttggtatcagaatgatgctggcctcataaaatgagttggggaggattccct

SEQ ID NO: 108828 - DNA, 80 bp, synthetic construct; identical to SEQ ID NO: 21216
  source 1..80: mol_type = other DNA

SEQ ID NO: 108829 - DNA, 80 bp, synthetic construct
  source 1..80: mol_type = other DNA
tgggagaaaattttcgcaacctactcatctgacaaagggctaatatccagaatctacaatgaactcaaacaaatttacaa

SEQ ID NO: 108830 - DNA, 80 bp, synthetic construct
  source 1..80: mol_type = other DNA
ccagttagaatggcaatcattaaaaagtcaggaaacaacaggtgctggagaggatgtggagaaataggaacacttttaca

SEQ ID NO: 108831 - DNA, 80 bp, synthetic construct
  source 1..80: mol_type = other DNA
atgtttattgcggcattattcacgatagcaaagacttggaaccaacccaaatgtccaacaatgatagaccggattaagaa

SEQ ID NO: 108832 - DNA, 80 bp, synthetic construct
  source 1..80: mol_type = other DNA
tgaacaatgagatcacatggacacaggaaggggaatatcacactctggggactgttgtggggtggggggagtggggaggg

SEQ ID NO: 108833 - DNA, 80 bp, synthetic construct; identical to SEQ ID NO: 21217
  source 1..80: mol_type = other DNA

SEQ ID NO: 108834 - DNA, 80 bp, synthetic construct
  source 1..80: mol_type = other DNA
ttgagtgctgcagccaagatgtagtagggcagatctcctagaatctttttactggtatgaattttccatttccctgtgag

SEQ ID NO: 108835 - DNA, 80 bp, synthetic construct
  source 1..80: mol_type = other DNA
gctaggtggtcaagtgtctcattggattttgtgatcaaattgaaagggagaagacttagggaaaaaaataattcagaaca

SEQ ID NO: 108836 - DNA, 80 bp, synthetic construct
  source 1..80: mol_type = other DNA
gagttatgtggcataactaagctggcctttcaggctctgaatccatttttttttttgccttgacttttctttagtgatag

SEQ ID NO: 108837 - DNA, 80 bp, synthetic construct
  source 1..80: mol_type = other DNA
accctttgcctgtgtttggagttttaaaaacctccttccagtaatactaggtgtgacagcagtaagtaagaaagttcata

SEQ ID NO: 108838 - DNA, 80 bp, synthetic construct; identical to SEQ ID NO: 21218
  source 1..80: mol_type = other DNA

SEQ ID NO: 108839 - DNA, 80 bp, synthetic construct
  source 1..80: mol_type = other DNA
aaaaaaaaaggtcgttgtgaatgttagctccagatcaactgcaagaacaaatcagcaatcccaagaggacccacagaccc

SEQ ID NO: 108840 - DNA, 80 bp, synthetic construct
  source 1..80: mol_type = other DNA
aggagctgagtcaatttggagagttgagcaaaatgcaggggcagaggaagcagcagaaagacactgagagctcgctgggt

SEQ ID NO: 108841 - DNA, 80 bp, synthetic construct
  source 1..80: mol_type = other DNA
aaatctggtgtgcagactccacaggcaggggaagaaccaagcccttttcttttgcagctggaaggtgggtagcctcgggc

SEQ ID NO: 108842 - DNA, 80 bp, synthetic construct
  source 1..80: mol_type = other DNA
agagacagccataatcctcctacttacacaactccagtgacctgggaatctcacccccatcccccacagcagctacagca

SEQ ID NO: 108843 - DNA, 80 bp, synthetic construct; identical to SEQ ID NO: 21219
  source 1..80: mol_type = other DNA

SEQ ID NO: 108844 - DNA, 80 bp, synthetic construct
  source 1..80: mol_type = other DNA
tgcagtttggctcacaggaagccacatccataggaaaagggggagagtactacatcaagagaacaccctaggggacaaaa

SEQ ID NO: 108845 - DNA, 80 bp, synthetic construct
  source 1..80: mol_type = other DNA
gaaatctctgatttacctgaaaaagaattcaggagttaggttattaagctaatcagggaggcaccagagaaaggtgaagc

SEQ ID NO: 108846 - DNA, 80 bp, synthetic construct
  source 1..80: mol_type = other DNA
agaaagaaattcagagctctaagacaaggtctttgaattaacccaatccaataaagacaaagaacagtgaataagaaaat

SEQ ID NO: 108847 - DNA, 80 bp, synthetic construct
  source 1..80: mol_type = other DNA
aatacaagaagcacaaagaacacctgggaaattcattgcaaaaagatcatcacctaggcacattgtcatcaggttatcca

SEQ ID NO: 108848 - DNA, 80 bp, synthetic construct; identical to SEQ ID NO: 21220
  source 1..80: mol_type = other DNA

SEQ ID NO: 108849 - DNA, 80 bp, synthetic construct
  source 1..80: mol_type = other DNA
taaccaaagtacacaggcaacaaagagcacaatgaatgcaatggtgcctcccatttcaatactaacattgaatgtaaacg

SEQ ID NO: 108850 - DNA, 80 bp, synthetic construct; identical to SEQ ID NO: 21221
  source 1..80: mol_type = other DNA

SEQ ID NO: 108851 - DNA, 80 bp, synthetic construct
  source 1..80: mol_type = other DNA
ttaatactccactgacagcactaaactgatcatcaagacagaaaatcaacaaagaaacaatggatttaaactatatcttg

SEQ ID NO: 108852 - DNA, 80 bp, synthetic construct
  source 1..80: mol_type = other DNA
ctctctcagaccacagtggaataaaactggaaatcaactgcaaaaggaatcttcaaaaccatgcaaatacatggaaatta

SEQ ID NO: 108853 - DNA, 80 bp, synthetic construct
  source 1..80: mol_type = other DNA
caaaaagactaaaaaagcaaaaattgacttctaaggtcacacctcatagaactagagaaacaagagcaaaccaaacccaa

SEQ ID NO: 108854 - DNA, 80 bp, synthetic construct
  source 1..80: mol_type = other DNA
gaaaatacaaataacttcactaagaaatgaaacaggagacattacaattgacaccactgaaataaaaaagatcactcaag

SEQ ID NO: 108855 - DNA, 80 bp, synthetic construct; identical to SEQ ID NO: 21222
  source 1..80: mol_type = other DNA

SEQ ID NO: 108856 - DNA, 80 bp, synthetic construct
  source 1..80: mol_type = other DNA
gctaacggaatccaataacatatcaaaaagataatccaccatgatcaagtgggtttcataccagggatgaagggatggtt

SEQ ID NO: 108857 - DNA, 80 bp, synthetic construct
  source 1..80: mol_type = other DNA
aatgtaataaaagctttccatgaaaaacccacagccaacatatattgaatgggtaaaagttgaaagcattccctctgaga

SEQ ID NO: 108858 - DNA, 80 bp, synthetic construct
  source 1..80: mol_type = other DNA
ttgaaaaacctaaagactcctctagaaagctcctagaactgataaaataattcagcacagtttccagatacaagattaat

SEQ ID NO: 108859 - DNA, 80 bp, synthetic construct; identical to SEQ ID NO: 21223
  source 1..80: mol_type = other DNA

SEQ ID NO: 108860 - DNA, 80 bp, synthetic construct
  source 1..80: mol_type = other DNA
tctggacgcatcacactacctgatttccaactatactataaggccatagtcaccaaaatatcatggtactgttataaaaa

SEQ ID NO: 108861 - DNA, 80 bp, synthetic construct
  source 1..80: mol_type = other DNA
atgaaactggatcttcatctctcaccttatacagaaatcaacccaagatggataaaggatttaaacctaagacatgaaac

SEQ ID NO: 108862 - DNA, 80 bp, synthetic construct
  source 1..80: mol_type = other DNA
agttggcagagtaaacagacaacccacagagtgggagaaaatcttcacaatctatacatctgacaaaggactaatatcca

SEQ ID NO: 108863 - DNA, 80 bp, synthetic construct; identical to SEQ ID NO: 21224
  source 1..80: mol_type = other DNA

SEQ ID NO: 108864 - DNA, 80 bp, synthetic construct
  source 1..80: mol_type = other DNA
cattatttgaaaaagattgaacacgcatgtttatagcagcacaattcacaattacaaaattgtgaaaccaaaccaaatgc

SEQ ID NO: 108865 - DNA, 80 bp, synthetic construct
  source 1..80: mol_type = other DNA
gtaactcaggaatggaaaaccaaacatcgggtgttctcactaatttgtgggagctaagctataaggacacaaagacataa

SEQ ID NO: 108866 - DNA, 80 bp, synthetic construct
  source 1..80: mol_type = other DNA
gtactcaataactgacggaaaaatgttaaaaaatgatatcatactacctttttccctttgagcctccgaaaggtgtgatg

SEQ ID NO: 108867 - DNA, 80 bp, synthetic construct; identical to SEQ ID NO: 21225
  source 1..80: mol_type = other DNA

SEQ ID NO: 108868 - DNA, 80 bp, synthetic construct
  source 1..80: mol_type = other DNA
caaaccctcttgtgaactgcacatgcaagggatctaggttgcatgctccttatgagaatctaatgcctgatgatctgaag

SEQ ID NO: 108869 - DNA, 80 bp, synthetic construct
  source 1..80: mol_type = other DNA
cctgcaacatggataatgaagcttgagatagatatactctgtgaaaaactttcaagctgattgagtcatgggcagaaaag

SEQ ID NO: 108870 - DNA, 80 bp, synthetic construct
  source 1..80: mol_type = other DNA
tttctatgttaattaaacttagcatttaaaatggataaggtagatttctcccaaaccttttgaaaatgataaagcttttt

SEQ ID NO: 108871 - DNA, 80 bp, synthetic construct; identical to SEQ ID NO: 21226
  source 1..80: mol_type = other DNA

SEQ ID NO: 108872 - DNA, 80 bp, synthetic construct
  source 1..80: mol_type = other DNA
ttttatgcagaatcattgcttactcaagatgttttattgtaagctttcctaaagtgtcttgtagaaatagtaaagaaaac

SEQ ID NO: 108873 - DNA, 80 bp, synthetic construct
  source 1..80: mol_type = other DNA
ctagaaacgttagaaaattgagctttttcttttcatgactaaattatcagtacaagaaaaagttggttgcaactcaaaac

SEQ ID NO: 108874 - DNA, 80 bp, synthetic construct
  source 1..80: mol_type = other DNA
agtctgattttcaaatgaagcctttcaattttttaaatttgcctaatggatatccattcttaaaatagaagcaagtgccc

SEQ ID NO: 108875 - DNA, 80 bp, synthetic construct; identical to SEQ ID NO: 21227
  source 1..80: mol_type = other DNA

SEQ ID NO: 108876 - DNA, 80 bp, synthetic construct
  source 1..80: mol_type = other DNA
gctcactgcaacctctgtttcccaggctcaagtgatcctcccacctcatcttcctgagtagctgggactacaggcatatg

SEQ ID NO: 108877 - DNA, 80 bp, synthetic construct
  source 1..80: mol_type = other DNA
ccaagactgtttactccatctatgtaaaatacacttggtcttgaagatgcagccacttttctcactcattctagagaggg

SEQ ID NO: 108878 - DNA, 80 bp, synthetic construct
  source 1..80: mol_type = other DNA
aaaatttgctgacacaaggaagtttcacttagaattccataacaagaaagagattagatcaaattcgctcaaattcacaa

SEQ ID NO: 108879 - DNA, 80 bp, synthetic construct; identical to SEQ ID NO: 21228
  source 1..80: mol_type = other DNA

SEQ ID NO: 108880 - DNA, 80 bp, synthetic construct
  source 1..80: mol_type = other DNA
aagaagaaagttgtaagtttagagatacaagtttcttgtctattaaaatatatttatagctcataattcatggggaactc

SEQ ID NO: 108881 - DNA, 80 bp, synthetic construct
  source 1..80: mol_type = other DNA
gatacctatgttacctcaggccaagccctagtacagtgtttcagttaaaaaaataaaaaacaagagtctaaaattctaag

SEQ ID NO: 108882 - DNA, 80 bp, synthetic construct; identical to SEQ ID NO: 21229
  source 1..80: mol_type = other DNA

SEQ ID NO: 108883 - DNA, 80 bp, synthetic construct
  source 1..80: mol_type = other DNA
gggcctgttatacccttttctctttcatattctctcatctttggctttatcagtttgtattctaatgatatttgtgatag

SEQ ID NO: 108884 - DNA, 80 bp, synthetic construct
  source 1..80: mol_type = other DNA
taatcagttgaaggccttaaagagaaaagactgaagtcccccaaggaggaaggaagtcttctttcagactgccttcagac

SEQ ID NO: 108885 - DNA, 80 bp, synthetic construct
  source 1..80: mol_type = other DNA
gtttctctggagaatgctgactaaatcaatgtgttctacatttcctttcttgggtctatgctgtgttctaaacagcctca

SEQ ID NO: 108886 - DNA, 80 bp, synthetic construct
  source 1..80: mol_type = other DNA
gattaaaaaaaaaggggaacactggtttaaaaaagttaaacagatttccttaacatacagaatttttggatcctttgata

SEQ ID NO: 108887 - DNA, 80 bp, synthetic construct; identical to SEQ ID NO: 21230
  source 1..80: mol_type = other DNA

SEQ ID NO: 108888 - DNA, 80 bp, synthetic construct
  source 1..80: mol_type = other DNA
agagatctgggcatctattctctagtttcctcccaggctcactgagaattttacatacatcattttacagagtgttggtt

SEQ ID NO: 108889 - DNA, 80 bp, synthetic construct
  source 1..80: mol_type = other DNA
ggctccaccataaccctgcaaacctttaaaagtactatattcattaaactcttttaatcactcatgcaagtgttccaggg

SEQ ID NO: 108890 - DNA, 80 bp, synthetic construct; identical to SEQ ID NO: 21231
  source 1..80: mol_type = other DNA

SEQ ID NO: 108891 - DNA, 80 bp, synthetic construct
  source 1..80: mol_type = other DNA
aaagaaaagtagcataagttttcccatgggcagtattctcctaaatttgtcttatactcccaactcttaagctcaccact

SEQ ID NO: 108892 - DNA, 80 bp, synthetic construct
  source 1..80: mol_type = other DNA
cagtaccacacagtctatcaggacatgtaaaagctttagctgtgtatacaaaacattccaagatatggttccagtcctgt

SEQ ID NO: 108893 - DNA, 80 bp, synthetic construct
  source 1..80: mol_type = other DNA
gttgagtatctaactgtgctagaaaatgtgctatattgttattagcaactctttaagttaaataggtggtaaaagtagtt

SEQ ID NO: 108894 - DNA, 80 bp, synthetic construct
  source 1..80: mol_type = other DNA
ggccaaatttctattttattattttattttatttttttacttctcaggatatatctcactgaggagctaaggtaataaag

SEQ ID NO: 108895 - DNA, 80 bp, synthetic construct; identical to SEQ ID NO: 21232
  source 1..80: mol_type = other DNA

SEQ ID NO: 108896 - DNA, 80 bp, synthetic construct
  source 1..80: mol_type = other DNA
atctacagttgctatttaaccactgggcaaagctatgtagggttcactctgttcttctggcagtttattaccaatctacc

SEQ ID NO: 108897 - DNA, 80 bp, synthetic construct
  source 1..80: mol_type = other DNA
aagaccatgcaactcattagtatcaaagctgagattgggcaggactctggtcttctctctagagttctcttgttcacata

SEQ ID NO: 108898 - DNA, 80 bp, synthetic construct
  source 1..80: mol_type = other DNA
agtataacttaacttcttccttccacatctttgccacaacagaggagtcctggtaattttatactaaatgcccaataatt

SEQ ID NO: 108899 - DNA, 80 bp, synthetic construct; identical to SEQ ID NO: 21233
  source 1..80: mol_type = other DNA

SEQ ID NO: 108900 - DNA, 80 bp, synthetic construct
  source 1..80: mol_type = other DNA
tcacataagtcagcccaatttttgaaagaaatggataactacagtgtccctttgaacttgtaggcgtttcagccctagta

SEQ ID NO: 108901 - DNA, 80 bp, synthetic construct
  source 1..80: mol_type = other DNA
acaatgaccacaatgatgatgtgaagtggttattgtacaagatcttttcaaaacctattgtagccaatttttcctggcca

SEQ ID NO: 108902 - DNA, 80 bp, synthetic construct; identical to SEQ ID NO: 21234
  source 1..80: mol_type = other DNA

SEQ ID NO: 108903 - DNA, 80 bp, synthetic construct
  source 1..80: mol_type = other DNA
ctactaatgaagttttatttgtttctagtctcctgtgaacaaatttaataatctagtctctatatgagctctacttttaa

SEQ ID NO: 108904 - DNA, 80 bp, synthetic construct
  source 1..80: mol_type = other DNA
tccagactaaaatagtgcatcaagaggactggcataatcagcctcactaaaaacagcctgattaatactaaatatgtcct

SEQ ID NO: 108905 - DNA, 80 bp, synthetic construct
  source 1..80: mol_type = other DNA
ttcaagctttcagagaagacactgacaaaggcttgtgatcctcaaaccttgttattttattcaccacagcctattactag

SEQ ID NO: 108906 - DNA, 80 bp, synthetic construct
  source 1..80: mol_type = other DNA
tacaaaaaattagccaggcatggtggcgggcgcctgtagtcccagctactcgggaggctgaggcaggagaatggcgtgaa

SEQ ID NO: 108907 - DNA, 80 bp, synthetic construct; identical to SEQ ID NO: 21235
  source 1..80: mol_type = other DNA

SEQ ID NO: 108908 - DNA, 80 bp, synthetic construct
  source 1..80: mol_type = other DNA
gtccatctggaaacaacaacagaattagaatcccatgaaaaattaaggcaacgctattatttataggggttgtcttgtcc

SEQ ID NO: 108909 - DNA, 80 bp, synthetic construct
  source 1..80: mol_type = other DNA
actctctaggtaagtgatatacaatagtaacctcttcctggatgaatcctcatgagtgtcatcacttaggctcaagggat

SEQ ID NO: 108910 - DNA, 80 bp, synthetic construct; identical to SEQ ID NO: 21236
  source 1..80: mol_type = other DNA

SEQ ID NO: 108911 - DNA, 80 bp, synthetic construct
  source 1..80: mol_type = other DNA
ccagcaaaatttattacaaagctgatcttgagacatcatattttcaagaattattagtagtattaaccaccagttgtata

SEQ ID NO: 108912 - DNA, 80 bp, synthetic construct
  source 1..80: mol_type = other DNA
tttccaaatttacaaagctaggaaaaggtggagctcagattcaaacccagcaaatctggcaccagcctcttcagagacta

SEQ ID NO: 108913 - DNA, 80 bp, synthetic construct
  source 1..80: mol_type = other DNA
tcaccaatatagaatcttaaggggacatttttggttttctaaaagaagcaaattgcaattttaggaaaagtatagtttag

SEQ ID NO: 108914 - DNA, 80 bp, synthetic construct; identical to SEQ ID NO: 21237
  source 1..80: mol_type = other DNA

SEQ ID NO: 108915 - DNA, 80 bp, synthetic construct
  source 1..80: mol_type = other DNA
ggagatctttaagaagacaccttcgcggattcagttatcttcagagccatttctgaatatattattttccatagatggat

SEQ ID NO: 108916 - DNA, 80 bp, synthetic construct
  source 1..80: mol_type = other DNA
aactaaaaattctcaaatgatataatataggcaataaaagaaggttgaaattcataggcctttgatattgaacagataca

SEQ ID NO: 108917 - DNA, 80 bp, synthetic construct
  source 1..80: mol_type = other DNA
aagaaagaaaacccacaatcatttccaagtacttctttatcccaagtgatttctttaattaaccaataccatccaggcca

SEQ ID NO: 108918 - DNA, 80 bp, synthetic construct; identical to SEQ ID NO: 21238
  source 1..80: mol_type = other DNA

SEQ ID NO: 108919 - DNA, 80 bp, synthetic construct
  source 1..80: mol_type = other DNA
gttcatcatatatggttcttgtagctgttacacccatacaggttgattactgagcatgtttaagtatgtatagaagccaa

SEQ ID NO: 108920 - DNA, 80 bp, synthetic construct
  source 1..80: mol_type = other DNA
aaagaaggttgatccacattatctttctttccctagctaacaattacatagtgtttactatgtgccaagaatgatccaaa

SEQ ID NO: 108921 - DNA, 80 bp, synthetic construct
  source 1..80: mol_type = other DNA
gtggaattggatttcaatgcaggttcccaagttgcaattcttaaagttcctctcagattgcctatgcttaacagaagggt

SEQ ID NO: 108922 - DNA, 80 bp, synthetic construct
  source 1..80: mol_type = other DNA
aggagtgaagcctctactctaggtttctactttctcggtgggtcaaagggatatatacttggaaagatctattccccaac

SEQ ID NO: 108923 - DNA, 80 bp, synthetic construct; identical to SEQ ID NO: 21239
  source 1..80: mol_type = other DNA

SEQ ID NO: 108924 - DNA, 80 bp, synthetic construct
  source 1..80: mol_type = other DNA
tattgcatacttattatataccagcaccaaagaattattaaaccccaaccctgccttcaagaagttcccaacatactggc

SEQ ID NO: 108925 - DNA, 80 bp, synthetic construct
  source 1..80: mol_type = other DNA
tgaaggaaaatcgtatatactaaggatatactgcagaaagagtcttgaaagagagtaggttaacagcctaaaaggagcct

SEQ ID NO: 108926 - DNA, 80 bp, synthetic construct
  source 1..80: mol_type = other DNA
aattctgcacaactataatgctctttttattctgctctctaacatggctgatggcatggttgtaaggcagtggacacaat

SEQ ID NO: 108927 - DNA, 80 bp, synthetic construct
  source 1..80: mol_type = other DNA
tcagatgggtcatacttgaacatgacacacgactttggtcctgactcatataatcagtaatgtcagagaatcttattgaa

SEQ ID NO: 108928 - DNA, 80 bp, synthetic construct; identical to SEQ ID NO: 21240
  source 1..80: mol_type = other DNA

SEQ ID NO: 108929 - DNA, 80 bp, synthetic construct
  source 1..80: mol_type = other DNA
catctaatttcacaagaagatttgaagctgacttttgaagaaaaacaaaaacaaagaaaattgaacatgacagaaatagc

SEQ ID NO: 108930 - DNA, 80 bp, synthetic construct
  source 1..80: mol_type = other DNA
ctctgacattcaaacacagtaagttggcttcatttctgttccttgagtgatttgggctggcttatttccataatacctga

SEQ ID NO: 108931 - DNA, 80 bp, synthetic construct
  source 1..80: mol_type = other DNA
aatgatgaatgagattactaaaaatcttgtcaaggtaggaggctatgagctgaattatgattgcatgatggaaaaaagca

SEQ ID NO: 108932 - DNA, 80 bp, synthetic construct; identical to SEQ ID NO: 21241
  source 1..80: mol_type = other DNA

SEQ ID NO: 108933 - DNA, 80 bp, synthetic construct
  source 1..80: mol_type = other DNA
atttgttctttcaggttcatagaaggcatttgtaaatctatgactaaaagtaaagtgagaagatgtgagtttaataagga

SEQ ID NO: 108934 - DNA, 80 bp, synthetic construct
  source 1..80: mol_type = other DNA
ttgtgctaaggttgtgtgttaatagggacaccttgaccttcatgcttccttactatcacttgcttctgtcttgtactttt

SEQ ID NO: 108935 - DNA, 80 bp, synthetic construct; identical to SEQ ID NO: 21242
  source 1..80: mol_type = other DNA

SEQ ID NO: 108936 - DNA, 80 bp, synthetic construct
  source 1..80: mol_type = other DNA
ccataaagtcctatacaaagaaagatacagcagtgtgaaagaggcctggatgaaaaaacaaagacagagccagtgagcca

SEQ ID NO: 108937 - DNA, 80 bp, synthetic construct
  source 1..80: mol_type = other DNA
aaaacgttctcagcactacaacttctgccttgttctgttccagaacagtatgagctcagtactttttcagactctcaatt

SEQ ID NO: 108938 - DNA, 80 bp, synthetic construct
  source 1..80: mol_type = other DNA
ttttaaaatttatgatgctaagccttttgttctggatatggtatgttgcacaggtctagggactgggatttcagatgtct

SEQ ID NO: 108939 - DNA, 80 bp, synthetic construct
  source 1..80: mol_type = other DNA
ctgaggatacaataatgtatatgatggacaagatacgtaaaagtgccttgaagagacttggtcttgtgaggggacagaca

SEQ ID NO: 108940 - DNA, 80 bp, synthetic construct
  source 1..80: mol_type = other DNA
tacactagtgatggaaggagatgggagatacaaaagcaagtcaatatttcagatttcgtaaatgaatggcaagcatagag

SEQ ID NO: 108941 - DNA, 80 bp, synthetic construct; identical to SEQ ID NO: 21243
  source 1..80: mol_type = other DNA

SEQ ID NO: 108942 - DNA, 80 bp, synthetic construct
  source 1..80: mol_type = other DNA
tactcagtaccagacccttttctaggacatggagttatagcagtgaacaatatagaaaaaaatccccgaattcatggaga

SEQ ID NO: 108943 - DNA, 80 bp, synthetic construct
  source 1..80: mol_type = other DNA
taaatgtatggtcaatgaaaatcagaagttgtagagaagtggataaattcacagtacgttttaaagtagacctaataaga

SEQ ID NO: 108944 - DNA, 80 bp, synthetic construct; identical to SEQ ID NO: 21244
  source 1..80: mol_type = other DNA

SEQ ID NO: 108945 - DNA, 80 bp, synthetic construct
  source 1..80: mol_type = other DNA
aaaggacatcctccaggccaaaatgtttccactggaacggtttctttgcttcctgattaaaagcttccctaatatatttc

SEQ ID NO: 108946 - DNA, 80 bp, synthetic construct
  source 1..80: mol_type = other DNA
atggccaactaaagaaaagaaatatgataaattcagatcatatcattgttccatttatccttgtaccctgtctgtgacag

SEQ ID NO: 108947 - DNA, 80 bp, synthetic construct
  source 1..80: mol_type = other DNA
agaacaaacctaatatgagccaagatggccgaataggaacagctccagtctacagctcccagcgtgagcgacgcagaaga

SEQ ID NO: 108948 - DNA, 80 bp, synthetic construct; identical to SEQ ID NO: 21245
  source 1..80: mol_type = other DNA

SEQ ID NO: 108949 - DNA, 80 bp, synthetic construct
  source 1..80: mol_type = other DNA
aaacaaagcagccgggaagctcgaactgggtggagcccaccacagctcaaggaggcctgactgcctctgtaggctccacc

SEQ ID NO: 108950 - DNA, 80 bp, synthetic construct
  source 1..80: mol_type = other DNA
ctgacccctgacccccgagcagcctaactgggaggcaaccccccagcaggggcacactgacacctcacacggcagggtat

SEQ ID NO: 108951 - DNA, 80 bp, synthetic construct
  source 1..80: mol_type = other DNA
ctctaaaaaccagagcgcctctcctcctccaaaggaacgcagttcctcaccagcaatggaacaaagctggatggagaatg

SEQ ID NO: 108952 - DNA, 80 bp, synthetic construct
  source 1..80: mol_type = other DNA
ggagctgaaaaccaaggcttgagaactacatgaagaatgcagaagcctcaggagccgatgcgatcaactggaagaaaggg

SEQ ID NO: 108953 - DNA, 80 bp, synthetic construct; identical to SEQ ID NO: 21246
  source 1..80: mol_type = other DNA

SEQ ID NO: 108954 - DNA, 80 bp, synthetic construct
  source 1..80: mol_type = other DNA
ggatctctcggcagaaaccctacaagccagaagagagtaggggccaatattcaacattcttaaagaaaagaattttcaac

SEQ ID NO: 108955 - DNA, 80 bp, synthetic construct
  source 1..80: mol_type = other DNA
actgcaaaatcatgccaaaacgtaaagaccatcgagactaggaagaaactgcatcaactaacgagcaaaataaccagcta

SEQ ID NO: 108956 - DNA, 80 bp, synthetic construct; identical to SEQ ID NO: 21247
  source 1..80: mol_type = other DNA

SEQ ID NO: 108957 - DNA, 80 bp, synthetic construct
  source 1..80: mol_type = other DNA
tcccacacattaataatgggagactttaacaccccactgtcaacattagacagatcaacagacagaaagtcaacaaggat

SEQ ID NO: 108958 - DNA, 80 bp, synthetic construct
  source 1..80: mol_type = other DNA
aaagaacagaaattataacaaactatctctcagaccacagtacaatcaaactagaactcaggattaagaatctcactcaa

SEQ ID NO: 108959 - DNA, 80 bp, synthetic construct; identical to SEQ ID NO: 21248
  source 1..80: mol_type = other DNA

SEQ ID NO: 108960 - DNA, 80 bp, synthetic construct
  source 1..80: mol_type = other DNA
aaagagagaagaatcaaatagacgcaataaaaaatgataaaggggatatcaccaccgatcccacagaaatacaaactacc

SEQ ID NO: 108961 - DNA, 80 bp, synthetic construct
  source 1..80: mol_type = other DNA
gcttaccaaccaaaaagagtccaggaccagatggattcacagccgaattctaccagaggtacaaggaggaactggtacca

SEQ ID NO: 108962 - DNA, 80 bp, synthetic construct
  source 1..80: mol_type = other DNA
ataaaatactggcaaaacgaatccagcagcacatcaaaaagcttatccaccatgatcaagtgggcttcatccctgggatg

SEQ ID NO: 108963 - DNA, 80 bp, synthetic construct; identical to SEQ ID NO: 21249
  source 1..80: mol_type = other DNA

SEQ ID NO: 108964 - DNA, 80 bp, synthetic construct
  source 1..80: mol_type = other DNA
tgattgtatatctagaaaaccccattgtctcagaccaaaatctccttaagctgataagcaacttcagcaaagtctcagga

SEQ ID NO: 108965 - DNA, 80 bp, synthetic construct
  source 1..80: mol_type = other DNA
actacaaaccactgctcaatgaaataaaagaggatacaaacaaatggaagaacattccatgctcatgggtaggaagaatc

SEQ ID NO: 108966 - DNA, 80 bp, synthetic construct; identical to SEQ ID NO: 21250
  source 1..80: mol_type = other DNA

SEQ ID NO: 108967 - DNA, 80 bp, synthetic construct
  source 1..80: mol_type = other DNA
gtagaaagctgaaactggatgccttccttacaacttatacaaaaatcaattcaagatggattaaagacttaaacgttaga

SEQ ID NO: 108968 - DNA, 80 bp, synthetic construct
  source 1..80: mol_type = other DNA
aaactaccatcagagtgaacaggcaactacaaaatgggagaaaattttcgcaacctactcatctgacaaagggctaatat

SEQ ID NO: 108969 - DNA, 80 bp, synthetic construct; identical to SEQ ID NO: 21251
  source 1..80: mol_type = other DNA

SEQ ID NO: 108970 - DNA, 80 bp, synthetic construct
  source 1..80: mol_type = other DNA
taaatcatgctgctataaagacacatgcacacgtatgtttattgtggcattattcacagtagcaaagacttggaaccaac

SEQ ID NO: 108971 - DNA, 80 bp, synthetic construct
  source 1..80: mol_type = other DNA
aaacaccgcatattctcactcataggtgggaattgaacgatgagatcacatggacacaggaaggggaatatcacactctg

SEQ ID NO: 108972 - DNA, 80 bp, synthetic construct; identical to SEQ ID NO: 21252
  source 1..80: mol_type = other DNA

SEQ ID NO: 108973 - DNA, 80 bp, synthetic construct
  source 1..80: mol_type = other DNA
acattttttacatggtcattttctgtttaaccttagttagacgttgaatggacttgatatatcccacagaagaggcccag

SEQ ID NO: 108974 - DNA, 80 bp, synthetic construct
  source 1..80: mol_type = other DNA
atcatatttgcgtataggtaaggaaaatgggagatggtgaagacagaagatataggtaaataggtaaatacgaattgcgt

SEQ ID NO: 108975 - DNA, 80 bp, synthetic construct
  source 1..80: mol_type = other DNA
ggatttcaaattttcagtgataaaactgcctagaacttggctaatttcagtcaatcctcaaagcttagctcttttagccc

SEQ ID NO: 108976 - DNA, 80 bp, synthetic construct; identical to SEQ ID NO: 21253
  source 1..80: mol_type = other DNA

SEQ ID NO: 108977 - DNA, 80 bp, synthetic construct
  source 1..80: mol_type = other DNA
tactgcttctggagtgttttaatgtgaacagactgaattatagtatttttagagtgcttggtaaaatgtgaaatagtacc

SEQ ID NO: 108978 - DNA, 80 bp, synthetic construct
  source 1..80: mol_type = other DNA
gtgggaaaaagtgaactaaagcttcaagatgaagaaagatagcttcattatttaaacagctctactaacatatagcactt

SEQ ID NO: 108979 - DNA, 80 bp, synthetic construct; identical to SEQ ID NO: 21254
  source 1..80: mol_type = other DNA

SEQ ID NO: 108980 - DNA, 80 bp, synthetic construct
  source 1..80: mol_type = other DNA
agtttatataattttagaataataaagaaaacaatttaaatgtaatattccatagtacagtaggaagacattattgaggg

SEQ ID NO: 108981 - DNA, 80 bp, synthetic construct
  source 1..80: mol_type = other DNA
agagatgcctattctctgaggtgttgaatggtagaagtggctatagaataaatatcattcatttcattagaaatccattt

SEQ ID NO: 108982 - DNA, 80 bp, synthetic construct
  source 1..80: mol_type = other DNA
gtaaaacttcaagctaaaatctcacgcttaatttatatccctcggcatgcccttcacctctcacatgttaacatactgac

SEQ ID NO: 108983 - DNA, 80 bp, synthetic construct; identical to SEQ ID NO: 21255
  source 1..80: mol_type = other DNA

SEQ ID NO: 108984 - DNA, 80 bp, synthetic construct
  source 1..80: mol_type = other DNA
tgaggggcaaccagaaaggagaagaaataagaggaaaaatggttcccagaggtaaaatgattacatttacaaaatgtatt

SEQ ID NO: 108985 - DNA, 80 bp, synthetic construct
  source 1..80: mol_type = other DNA
agcagctggcatagttgattgctaaatcaattcccagactcctagaatctgttgttttcattttaaacaaccttaagacc

SEQ ID NO: 108986 - DNA, 80 bp, synthetic construct
  source 1..80: mol_type = other DNA
gtgataaaccatttgtgctgtgaagtatgagatcacagacaactctgcttgtggtttctatgccagattcctttcactca

SEQ ID NO: 108987 - DNA, 80 bp, synthetic construct
  source 1..80: mol_type = other DNA
aaaaaaaaaaaaaaaacctaagtggcagggaccctctgtttttgaaaacatatttgtaatcctccctaagtcctggagaa

SEQ ID NO: 108988 - DNA, 80 bp, synthetic construct; identical to SEQ ID NO: 21256
  source 1..80: mol_type = other DNA

SEQ ID NO: 108989 - DNA, 80 bp, synthetic construct
  source 1..80: mol_type = other DNA
aactacctgagttttcctccaattccacttagcacgctaggccaggctctttgtaaatttcctttctcattatccttaaa

SEQ ID NO: 108990 - DNA, 80 bp, synthetic construct
  source 1..80: mol_type = other DNA
aatgttgcaactgtaatacctcccttccgctttgtttccacctgtgggaaaatgtctttcgtttttttctgttttttggc

SEQ ID NO: 108991 - DNA, 80 bp, synthetic construct
  source 1..80: mol_type = other DNA
agggtgctttaataaagatgagaaaacttcacacattttcaactacaggcatgtaacataaactgaaatattttgtagat

SEQ ID NO: 108992 - DNA, 80 bp, synthetic construct; identical to SEQ ID NO: 21257
  source 1..80: mol_type = other DNA

SEQ ID NO: 108993 - DNA, 80 bp, synthetic construct
  source 1..80: mol_type = other DNA
ctataagaaattggaattggaattgtgcaaacaagtcttttctactaaacaagagctcattacccaaacactgtggatgg

SEQ ID NO: 108994 - DNA, 80 bp, synthetic construct
  source 1..80: mol_type = other DNA
atcacgtgtgaataactaaggacagacacaagtatgaatggtctaatttggaagagaacacagtggtacagatcacatct

SEQ ID NO: 108995 - DNA, 80 bp, synthetic construct
  source 1..80: mol_type = other DNA
tacaagctccgcctcccaggttcacgccattctcctgcctcagccttcctagtagctgggactacaggcgtgtgccacca

SEQ ID NO: 108996 - DNA, 80 bp, synthetic construct; identical to SEQ ID NO: 21258
  source 1..80: mol_type = other DNA

SEQ ID NO: 108997 - DNA, 80 bp, synthetic construct
  source 1..80: mol_type = other DNA
gttctaaccactgtggccctctctctggaattttgtagagaatataatctgcatcatatgatttagtgcttaattagcac

SEQ ID NO: 108998 - DNA, 80 bp, synthetic construct
  source 1..80: mol_type = other DNA
caactttgagcatagcaactcagatgttgatgaagatgtaaacagaaaaatatactgtctttcaattgtggaacaattat

SEQ ID NO: 108999 - DNA, 80 bp, synthetic construct
  source 1..80: mol_type = other DNA
tcaatgctacaatcagtaacgttaatgttaatattgcaaaattcatttttgtcttcatcttttgcaaatacaaaagcatc

SEQ ID NO: 109000 - DNA, 80 bp, synthetic construct; identical to SEQ ID NO: 21259
  source 1..80: mol_type = other DNA

SEQ ID NO: 109001 - DNA, 80 bp, synthetic construct
  source 1..80: mol_type = other DNA
agcaattcaaattactctgtattatttcttccttttcagactatattagaacatgcttttaatagtcccagtgggttacc

SEQ ID NO: 109002 - DNA, 80 bp, synthetic construct
  source 1..80: mol_type = other DNA
gaaagttctctcaaagcaaagatatacctacagaacctgcctcctctttcgcaagactaggagacaaaattctaaaattg

SEQ ID NO: 109003 - DNA, 80 bp, synthetic construct
  source 1..80: mol_type = other DNA
ggtaacagcttcagaggaaacctccactcagaagtacatggatctatttctgtgtgtattccagttacttacagtgacta

SEQ ID NO: 109004 - DNA, 80 bp, synthetic construct; identical to SEQ ID NO: 21260
  source 1..80: mol_type = other DNA

SEQ ID NO: 109005 - DNA, 80 bp, synthetic construct
  source 1..80: mol_type = other DNA
aaataaatattctacaccctgaacttaattcaacaaacatatcaggtttctggcaaggtatgaggcagtggagatttaaa

SEQ ID NO: 109006 - DNA, 80 bp, synthetic construct
  source 1..80: mol_type = other DNA
tgctatatatgggaaccaccatccacaccaaacacttaaataatgcttattatggttattatagtcaagagggttttatg

SEQ ID NO: 109007 - DNA, 80 bp, synthetic construct; identical to SEQ ID NO: 21261
  source 1..80: mol_type = other DNA

SEQ ID NO: 109008 - DNA, 80 bp, synthetic construct
  source 1..80: mol_type = other DNA
acaagtgcagttccaacagaggcataagatgacttaaattacggtaaatgaaatggatccaaacatattttctgaaagat

SEQ ID NO: 109009 - DNA, 80 bp, synthetic construct
  source 1..80: mol_type = other DNA
cttatcgggtattttccctcaatttggagatctagaatatctcctctgtgtaaagatgccaatctatttttgcagtctta

SEQ ID NO: 109010 - DNA, 80 bp, synthetic construct
  source 1..80: mol_type = other DNA
ttcccgttgatccttcaactaaaagagttaatgttgtaaacattacctgaagcacttggcataatgttctgtctcacaga

SEQ ID NO: 109011 - DNA, 80 bp, synthetic construct
  source 1..80: mol_type = other DNA
gatgtttgtgtatgcttgatggctagcaataagttctacataaattctaccttggcttcatgagggcaggtaccatacat

SEQ ID NO: 109012 - DNA, 80 bp, synthetic construct; identical to SEQ ID NO: 21262
  source 1..80: mol_type = other DNA

SEQ ID NO: 109013 - DNA, 80 bp, synthetic construct
  source 1..80: mol_type = other DNA
ggaaagaaagatatattgctccatttcaggttataaacaggtcaagttctagcagcttccttactgcattatatttttag

SEQ ID NO: 109014 - DNA, 80 bp, synthetic construct
  source 1..80: mol_type = other DNA
aatttcttaagtcacacatagtgctcatcaccacccatgaataatggcttcctaaagtttacccttccttccttcaattc

SEQ ID NO: 109015 - DNA, 80 bp, synthetic construct
  source 1..80: mol_type = other DNA
ctttctgattgaccaagtgttctataatctgtcatcaaaacatatacaacgtattattgtctgatgtttgccaattttag

SEQ ID NO: 109016 - DNA, 80 bp, synthetic construct; identical to SEQ ID NO: 21263
  source 1..80: mol_type = other DNA

SEQ ID NO: 109017 - DNA, 80 bp, synthetic construct
  source 1..80: mol_type = other DNA
tatttatactctaacttattttactcactgtcctagtgaccccttcttcacctctgacctttctccaaaactccacactt

SEQ ID NO: 109018 - DNA, 80 bp, synthetic construct
  source 1..80: mol_type = other DNA
tcttcacatacttcccttttgcagctagataccatctgtggcttgaataatatgtggtgagttcaaagtctcccacttct

SEQ ID NO: 109019 - DNA, 80 bp, synthetic construct; identical to SEQ ID NO: 21264
  source 1..80: mol_type = other DNA

SEQ ID NO: 109020 - DNA, 80 bp, synthetic construct
  source 1..80: mol_type = other DNA
ctgctgctttgtgccaccttggcaaaccacttaagctctttgtgtctcaattctttcatctgtaaaacatggatgataat

SEQ ID NO: 109021 - DNA, 80 bp, synthetic construct
  source 1..80: mol_type = other DNA
acagacatatcctaccaatatctcaaggtctatttcaattgttatgtcttccataccatcttctttggtctttcacacta

SEQ ID NO: 109022 - DNA, 80 bp, synthetic construct
  source 1..80: mol_type = other DNA
aggatttaaatcttggcttgcgtgaccaccgagtttatatttttcccattggttctcattacactatcagggtccactgg

SEQ ID NO: 109023 - DNA, 80 bp, synthetic construct
  source 1..80: mol_type = other DNA
gtgacagcattggacaattttaaacatgtaaggcactttatggaaacttcatgatcttttttttcttatattaagcattt

SEQ ID NO: 109024 - DNA, 80 bp, synthetic construct; identical to SEQ ID NO: 21265
  source 1..80: mol_type = other DNA

SEQ ID NO: 109025 - DNA, 80 bp, synthetic construct
  source 1..80: mol_type = other DNA
atcagaagatgaatgcagaaagacagagagcagtaagctagactctaatgattagggtaaaattgaaattgattatacaa

SEQ ID NO: 109026 - DNA, 80 bp, synthetic construct
  source 1..80: mol_type = other DNA
aacaatgaataatgctgaattctatgtatgctgtgttttcttgatctgaaaaccgagatacctaataagtgtctcacaga

SEQ ID NO: 109027 - DNA, 80 bp, synthetic construct; identical to SEQ ID NO: 21266
  source 1..80: mol_type = other DNA

SEQ ID NO: 109028 - DNA, 80 bp, synthetic construct
  source 1..80: mol_type = other DNA
tactctttctttataaaattcatgtgccaaaatctgtggtttctaactgcacaaatgctaaagaaagagaaaggcaggca

SEQ ID NO: 109029 - DNA, 80 bp, synthetic construct
  source 1..80: mol_type = other DNA
tcaaggccatcctggccaacatggtgaaatcccgtctctactaaaaatagaaaaaaaattagatgggcacggtggcgtgc

SEQ ID NO: 109030 - DNA, 80 bp, synthetic construct
  source 1..80: mol_type = other DNA
catctcaaaaaaaaaaaataaagaaggaacgaaagaaggaaggaaggaaggaaggaaggaaggaaatgttttattatgaa

SEQ ID NO: 109031 - DNA, 80 bp, synthetic construct; identical to SEQ ID NO: 21267
  source 1..80: mol_type = other DNA

SEQ ID NO: 109032 - DNA, 80 bp, synthetic construct
  source 1..80: mol_type = other DNA
gaaaattactcattcctggtatactgagattagaatgtatattttctatgtcttcattgtatacttatcaagttatcctt

SEQ ID NO: 109033 - DNA, 80 bp, synthetic construct
  source 1..80: mol_type = other DNA
aactatgcctaccttggagcaggatttttttcagaagtctaaagcaaagctaaatggtacctagtcttgtctaatacaag

SEQ ID NO: 109034 - DNA, 80 bp, synthetic construct
  source 1..80: mol_type = other DNA
gctctttctagctatggacttaaaacccattgaattggaatgcaggctgccaaagaatgccttattacaatcagagaaga

SEQ ID NO: 109035 - DNA, 80 bp, synthetic construct
  source 1..80: mol_type = other DNA
acacaaaaagcagaataaattaccgtgacataattcttggctcaagtaaaagtcagacagtagctgaaattttaatagtg

SEQ ID NO: 109036 - DNA, 80 bp, synthetic construct; identical to SEQ ID NO: 21268
  source 1..80: mol_type = other DNA

SEQ ID NO: 109037 - DNA, 80 bp, synthetic construct
  source 1..80: mol_type = other DNA
aggaaattggaattactggaaggttgataaagataaataaatctggcggaatataccttgaccatccgtactatcaattt

SEQ ID NO: 109038 - DNA, 80 bp, synthetic construct
  source 1..80: mol_type = other DNA
aggaaaaaaagtggaggttaatcagtttcaagacagctaccataagacgaatcaatctctttctttctgtctcaatctct

SEQ ID NO: 109039 - DNA, 80 bp, synthetic construct
  source 1..80: mol_type = other DNA
tggagaaagtatctctggagaggggagatcttcggtgttcataatatacctaaaattacaaaatgtacatacaggtctat

SEQ ID NO: 109040 - DNA, 80 bp, synthetic construct; identical to SEQ ID NO: 21269
  source 1..80: mol_type = other DNA

SEQ ID NO: 109041 - DNA, 80 bp, synthetic construct
  source 1..80: mol_type = other DNA
gtgtcagcacatttcatcagcaagcgttttcaaattagaactgcaatttgggttacttttgagggtgtgacagtacaaag

SEQ ID NO: 109042 - DNA, 80 bp, synthetic construct
  source 1..80: mol_type = other DNA
caataaacttggcaagaattgtcttattctataattgccagtcagagtcaatgtctcaccacttacattgtctctaaatt

SEQ ID NO: 109043 - DNA, 80 bp, synthetic construct
  source 1..80: mol_type = other DNA
atgaaacaacaggcatattacataggctttccttctctcccttcttccttttcaactcctggacaagaaatactcgcttt

SEQ ID NO: 109044 - DNA, 80 bp, synthetic construct; identical to SEQ ID NO: 21270
  source 1..80: mol_type = other DNA

SEQ ID NO: 109045 - DNA, 80 bp, synthetic construct
  source 1..80: mol_type = other DNA
ttagtgcatggttctctgtgtcttgagactttcttaggaattatattttatgatcaacaaataactactatgaatgattt

SEQ ID NO: 109046 - DNA, 80 bp, synthetic construct
  source 1..80: mol_type = other DNA
aaaattatgtgtagagtatgaatttcttgaaccaacacaggtgaacaaatggttagcactcctttgacctaaaattgaac

SEQ ID NO: 109047 - DNA, 80 bp, synthetic construct
  source 1..80: mol_type = other DNA
aatttttgtatttttagtagagacggggtttcaccatgttggccaggctggtctcaaactcctgacctcaggtgatccgc

SEQ ID NO: 109048 - DNA, 80 bp, synthetic construct; identical to SEQ ID NO: 21271
  source 1..80: mol_type = other DNA

SEQ ID NO: 109049 - DNA, 80 bp, synthetic construct
  source 1..80: mol_type = other DNA
tgaggcaggagaatcgcttgaacccaggaggcagaggttgcagtgagccgagatcacaccattgcactccagcctgagtg

SEQ ID NO: 109050 - DNA, 80 bp, synthetic construct
  source 1..80: mol_type = other DNA
cccagccctaacattgaatttttgatatatatagactgaaacttgtaagtgttgagaggttctcttcatgtagggaactc

SEQ ID NO: 109051 - DNA, 80 bp, synthetic construct; identical to SEQ ID NO: 21272
  source 1..80: mol_type = other DNA

SEQ ID NO: 109052 - DNA, 80 bp, synthetic construct
  source 1..80: mol_type = other DNA
atatatatttagtgactttccccctcatttaaatttcttactgaaaatgtagaagaaggaaaaggggaggaggaggaaat

SEQ ID NO: 109053 - DNA, 80 bp, synthetic construct
  source 1..80: mol_type = other DNA
cggagtgcaaaggttctcattgtctagttttctagagcctagatgtgttacctatttgttttagaaatgagatgtctctt

SEQ ID NO: 109054 - DNA, 80 bp, synthetic construct
  source 1..80: mol_type = other DNA
ctccttccttaacaatactgtcttcttggaaaagttttcccaaacatgaacatagttctgtcagtttttaaatctgcaaa

SEQ ID NO: 109055 - DNA, 80 bp, synthetic construct
  source 1..80: mol_type = other DNA
tctatctccatcaatagttctttggagtggctaaaccaagttcatgtataagggagaaaattttaaagttttggaaaaca

SEQ ID NO: 109056 - DNA, 80 bp, synthetic construct; identical to SEQ ID NO: 21273
  source 1..80: mol_type = other DNA

SEQ ID NO: 109057 - DNA, 80 bp, synthetic construct
  source 1..80: mol_type = other DNA
attgcttggaatacctggttttaaatccccatggacaaatatgtcaatcatatatcgacagaatgcatactgatctgaca

SEQ ID NO: 109058 - DNA, 80 bp, synthetic construct
  source 1..80: mol_type = other DNA
aagaaagacgacaaatataatgcttcatttcttccatacaaaaataacctcaaaaattgaaaaggactagttcagggtaa

SEQ ID NO: 109059 - DNA, 80 bp, synthetic construct
  source 1..80: mol_type = other DNA
atcaaatactcagttccagcccttctgctaattgtctctatggagcagcagaatgtcttttccaaaagactatcaggaga

SEQ ID NO: 109060 - DNA, 80 bp, synthetic construct; identical to SEQ ID NO: 21274
  source 1..80: mol_type = other DNA

SEQ ID NO: 109061 - DNA, 80 bp, synthetic construct
  source 1..80: mol_type = other DNA
tatgtaaacatcattttgggcagacctggtcttcaggagttggttttttttctattccctctagattaaagacattgcac

SEQ ID NO: 109062 - DNA, 80 bp, synthetic construct
  source 1..80: mol_type = other DNA
cgaaggcagctttaggaccaagagagtttattgaatttaagcaacatgttacattcttaattgctccaaattatgcatat

SEQ ID NO: 109063 - DNA, 80 bp, synthetic construct
  source 1..80: mol_type = other DNA
gcaggccaaaactcataaagttccaaaaatttagatgtattttagttgttgaaattggagcacattttcccacaggagag

SEQ ID NO: 109064 - DNA, 80 bp, synthetic construct; identical to SEQ ID NO: 21275
  source 1..80: mol_type = other DNA

SEQ ID NO: 109065 - DNA, 80 bp, synthetic construct
  source 1..80: mol_type = other DNA
gtgactgtactctttttagatttgttctgcctatactctaggagtagttctcaaagggcaacttaaacacgagaaagaga

SEQ ID NO: 109066 - DNA, 80 bp, synthetic construct
  source 1..80: mol_type = other DNA
ttcccaaaataattactcttagaggcactatagactcccatgacagcaaataagagtgtttgtttttatgtatgttggaa

SEQ ID NO: 109067 - DNA, 80 bp, synthetic construct
  source 1..80: mol_type = other DNA
acaatgtaatgaaacttttcagcttgtatgttgaaatattatcaaagtacagtcagccctccatttccctgggttccaca

SEQ ID NO: 109068 - DNA, 80 bp, synthetic construct
  source 1..80: mol_type = other DNA
ctgtaatcccagctactccggaggctgaggcaggagaactgcttgaacccgggaggcagaggttgcagtgagctgagatt

SEQ ID NO: 109069 - DNA, 80 bp, synthetic construct; identical to SEQ ID NO: 21276
  source 1..80: mol_type = other DNA

SEQ ID NO: 109070 - DNA, 80 bp, synthetic construct
  source 1..80: mol_type = other DNA
aaaatcattcatttaattaatacaccaacagcccaatgaacttctaattgcaaaaaggaaatttcttatgaattcagagg

SEQ ID NO: 109071 - DNA, 80 bp, synthetic construct
  source 1..80: mol_type = other DNA
ttaagttaggatgcccatttccacctgtccttggcaatgaccttaacaacgtataagaattctaggtaggtatgtgttgg

SEQ ID NO: 109072 - DNA, 80 bp, synthetic construct
  source 1..80: mol_type = other DNA
tttgctcatcattgtaagtactttttccccaaataaacatccttcttggaataacacatgctgtccatttctctccttct

SEQ ID NO: 109073 - DNA, 80 bp, synthetic construct; identical to SEQ ID NO: 21277
  source 1..80: mol_type = other DNA

SEQ ID NO: 109074 - DNA, 80 bp, synthetic construct
  source 1..80: mol_type = other DNA
ggagcaatgtctgactatgccaactcttcctactctacaaacagatttagatgggttcataaaaactagattatttgatg

SEQ ID NO: 109075 - DNA, 80 bp, synthetic construct
  source 1..80: mol_type = other DNA
ttaaataattactaataaatatgtgtcccatgtgaaaatctgtttccaagtgagtaaaggacctatgagccttatttctt

SEQ ID NO: 109076 - DNA, 80 bp, synthetic construct
  source 1..80: mol_type = other DNA
gctaactcaactaagtcatcatataaaattttcaaaaccaaagcctcagaaattaaaaaaaactatatctttatcttgct

SEQ ID NO: 109077 - DNA, 80 bp, synthetic construct; identical to SEQ ID NO: 21278
  source 1..80: mol_type = other DNA

SEQ ID NO: 109078 - DNA, 80 bp, synthetic construct
  source 1..80: mol_type = other DNA
aaaataaacattattttaaagtgttccggtgatgagtttttatcaataaaatgtggctcccaaatccccaaagatatgaa

SEQ ID NO: 109079 - DNA, 80 bp, synthetic construct
  source 1..80: mol_type = other DNA
tgaacagcaatctaaagtgtaaaggatttcaggatctaagtaatcataccagtgaatccaaagattatttctgctgtttt

SEQ ID NO: 109080 - DNA, 80 bp, synthetic construct
  source 1..80: mol_type = other DNA
ttttttcatggtgatataatcaccttgaaaattggaaaaagttttagagctcctaagttttaatatgacttatatcttaa

SEQ ID NO: 109081 - DNA, 80 bp, synthetic construct; identical to SEQ ID NO: 21279
  source 1..80: mol_type = other DNA

SEQ ID NO: 109082 - DNA, 80 bp, synthetic construct
  source 1..80: mol_type = other DNA
caattacaggaatagtctctacatgttagatccccgtattctgtaaaggagtctcaggattatacagcaaactggagtca

SEQ ID NO: 109083 - DNA, 80 bp, synthetic construct
  source 1..80: mol_type = other DNA
ttttgcaaagtggggatgtaagtttgacatcactcttgctgaagaatggcgaaatatgtcacattcagagctttctaaag

SEQ ID NO: 109084 - DNA, 80 bp, synthetic construct; identical to SEQ ID NO: 21280
  source 1..80: mol_type = other DNA

SEQ ID NO: 109085 - DNA, 80 bp, synthetic construct
  source 1..80: mol_type = other DNA
tgatttcggatgctacctccaaaccccttttaaaaatacttcaaaatgcccctttagatctgtgaacacattttagtatt

SEQ ID NO: 109086 - DNA, 80 bp, synthetic construct
  source 1..80: mol_type = other DNA
ctcctgctctgaatgtttacctttctgttcatgctttgacacagctgctttctctttgtcctccttttctttgggttttg

SEQ ID NO: 109087 - DNA, 80 bp, synthetic construct
  source 1..80: mol_type = other DNA
atttacaaacataatgtttcatctgtactatgtcattaaggaaaattggaaaagaaagagggaagaaaggtaagtcacaa

SEQ ID NO: 109088 - DNA, 80 bp, synthetic construct; identical to SEQ ID NO: 21281
  source 1..80: mol_type = other DNA

SEQ ID NO: 109089 - DNA, 80 bp, synthetic construct
  source 1..80: mol_type = other DNA
ctccttttataagcacatgatcattttgcttgataactgaaagatcttaagggtcattcaagaaactgaaatgccaacaa

SEQ ID NO: 109090 - DNA, 80 bp, synthetic construct
  source 1..80: mol_type = other DNA
tggctcctgtttatcttaagtcagcgataattctactagtttttaaagcccttaaacatatcatgggaaattcaaagggc

SEQ ID NO: 109091 - DNA, 80 bp, synthetic construct
  source 1..80: mol_type = other DNA
tgaatattggacattcctttttgtatgtgactacacataaccactatacaccacagcaactctactgcaatgttggaatc

SEQ ID NO: 109092 - DNA, 80 bp, synthetic construct
  source 1..80: mol_type = other DNA
cagggtgaaaccccatctctactaaaaatgcaaaaattagctgggcgtggtggtgcatgcctgtaatcccagctactcag

SEQ ID NO: 109093 - DNA, 80 bp, synthetic construct; identical to SEQ ID NO: 21282
  source 1..80: mol_type = other DNA

SEQ ID NO: 109094 - DNA, 80 bp, synthetic construct
  source 1..80: mol_type = other DNA
tgttgatactgtattaggtattggagaatattctcatggccaaattcatttggcaacaataagctaacctggtcatttag

SEQ ID NO: 109095 - DNA, 80 bp, synthetic construct
  source 1..80: mol_type = other DNA
taaacttttttttttttttgagatgaagtcttgctttgtcatccaggctgtagtgcagtggcacgatctcggctcactgc

SEQ ID NO: 109096 - DNA, 80 bp, synthetic construct; identical to SEQ ID NO: 21283
  source 1..80: mol_type = other DNA

SEQ ID NO: 109097 - DNA, 80 bp, synthetic construct
  source 1..80: mol_type = other DNA
aacacttctagagagtctatgttgacctgggctcacagctagttgctggagctctaaaaatcagcataataataaaacta

SEQ ID NO: 109098 - DNA, 80 bp, synthetic construct
  source 1..80: mol_type = other DNA
ctgcattctctatattttctatatttttccacatatttaaatttctttatttcttttttatttatttttgtctttttgtt

SEQ ID NO: 109099 - DNA, 80 bp, synthetic construct
  source 1..80: mol_type = other DNA
ttgtatttttagtagagatggggtttcaccatgttggccaggctggtcttgaactcctgacctcaggcgatccacccgcc

SEQ ID NO: 109100 - DNA, 80 bp, synthetic construct; identical to SEQ ID NO: 21284
  source 1..80: mol_type = other DNA

SEQ ID NO: 109101 - DNA, 80 bp, synthetic construct
  source 1..80: mol_type = other DNA
tatagagactgcattatgtaaatatgtgtttagaaataaacttgtctaaacctgttaaacttgccaacttttttttttgt

SEQ ID NO: 109102 - DNA, 80 bp, synthetic construct
  source 1..80: mol_type = other DNA
tcagatttctttttaatgccattataatttataagtgggcaatgattattttctaagaggtagaaccacatatatagcca

SEQ ID NO: 109103 - DNA, 80 bp, synthetic construct
  source 1..80: mol_type = other DNA
atcatgaaactaaagcaacacccaacttctatttacttttgagtacacattcttcaattttgtgccaaaatatttttcct

SEQ ID NO: 109104 - DNA, 80 bp, synthetic construct
  source 1..80: mol_type = other DNA
acatcagcatatttgattcaatcttggaattagcgtgatccattagctactgcatcagattcagaatgtctgatgccaaa

SEQ ID NO: 109105 - DNA, 80 bp, synthetic construct; identical to SEQ ID NO: 21285
  source 1..80: mol_type = other DNA

SEQ ID NO: 109106 - DNA, 80 bp, synthetic construct
  source 1..80: mol_type = other DNA
taaatgagttaggagtagaaagagtagaatcagaatgactaacccaatttctaatcacagtgaattgcacacgtattaat

SEQ ID NO: 109107 - DNA, 80 bp, synthetic construct
  source 1..80: mol_type = other DNA
cactgacatccacatcaattagacagcctggcccaaacttggctcacctcactcaacttctcttttcatcattgttttct

SEQ ID NO: 109108 - DNA, 80 bp, synthetic construct; identical to SEQ ID NO: 21286
  source 1..80: mol_type = other DNA

SEQ ID NO: 109109 - DNA, 80 bp, synthetic construct
  source 1..80: mol_type = other DNA
acatacacatataaaataaaaataaaaagcatatactgtatacaaacatgtatacacatatacacatacatatatatgtt

SEQ ID NO: 109110 - DNA, 80 bp, synthetic construct
  source 1..80: mol_type = other DNA
cgtaaatatttaaatggaaagtatttatggcaagcagactcaagatggctcccagtgactcccaacttgtggcattcata

SEQ ID NO: 109111 - DNA, 80 bp, synthetic construct
  source 1..80: mol_type = other DNA
tctgtcttcctgtttctctctcaataggtttaatgaagccagctgtcatgttgatgagactcatgtgtcaaggaactgaa

SEQ ID NO: 109112 - DNA, 80 bp, synthetic construct; identical to SEQ ID NO: 21287
  source 1..80: mol_type = other DNA

SEQ ID NO: 109113 - DNA, 80 bp, synthetic construct
  source 1..80: mol_type = other DNA
aagaatactcaatgtatactgactgcacctgggtttttagtcttaaccaaatcatataccagttttatgacctggcaaaa

SEQ ID NO: 109114 - DNA, 80 bp, synthetic construct; identical to SEQ ID NO: 21288
  source 1..80: mol_type = other DNA

SEQ ID NO: 109115 - DNA, 80 bp, synthetic construct
  source 1..80: mol_type = other DNA
ttacctaaatgggtagtttcttaaaaatactgaattgaggcttctagctaattgcctaaaatgtatattttaaaagataa

SEQ ID NO: 109116 - DNA, 80 bp, synthetic construct
  source 1..80: mol_type = other DNA
tatggtactttcagttctcaaacttttaaagtaaaaatattgatcaagatttatgcatgaccactttttttttttttttt

SEQ ID NO: 109117 - DNA, 80 bp, synthetic construct
  source 1..80: mol_type = other DNA
tttttactagagacaggatttcaccatgttgtccaggctggttttgaattcctgacctcaagtgattcaccggcctcggc

SEQ ID NO: 109118 - DNA, 80 bp, synthetic construct; identical to SEQ ID NO: 21289
  source 1..80: mol_type = other DNA

SEQ ID NO: 109119 - DNA, 80 bp, synthetic construct
  source 1..80: mol_type = other DNA
tattgtatattttaaaataactagagagtgaatttggaatgttcccaatgcaaagaaataataaatgtttgaggtgatgg

SEQ ID NO: 109120 - DNA, 80 bp, synthetic construct
  source 1..80: mol_type = other DNA
caaggtataatactggtcaaaaattgtgaaccaaatatgttattttagtttttttattgctgtggtaacaaattaaaaca

SEQ ID NO: 109121 - DNA, 80 bp, synthetic construct; identical to SEQ ID NO: 21290
  source 1..80: mol_type = other DNA

SEQ ID NO: 109122 - DNA, 80 bp, synthetic construct
  source 1..80: mol_type = other DNA
tattcttctcacgttttcaagacagccaatgggcaaaagtactcatacttcaaatctctttgttctctgctgaatctgtc

SEQ ID NO: 109123 - DNA, 80 bp, synthetic construct
  source 1..80: mol_type = other DNA
atggggctcaaaattctgtctaccacatatgatggagctcttcattttcctctcacattatgagattctctattaagtgt

SEQ ID NO: 109124 - DNA, 80 bp, synthetic construct
  source 1..80: mol_type = other DNA
ttacctttcgccagtgtctttgtttctggtttttcttttttctcaattttttccttgtgagttgcttaaacagaaaattt

SEQ ID NO: 109125 - DNA, 80 bp, synthetic construct; identical to SEQ ID NO: 21291
  source 1..80: mol_type = other DNA

SEQ ID NO: 109126 - DNA, 80 bp, synthetic construct
  source 1..80: mol_type = other DNA
attttttcaagaataacaatggtaattaaactacgaaaattaagtagtaaaatatgagatttaattgggcagttaacaaa

SEQ ID NO: 109127 - DNA, 80 bp, synthetic construct
  source 1..80: mol_type = other DNA
aaacagtgtcctccagaatcttggagagatgatttaagcctcagaaagcctaatattcagttgaagagcaagtgtcccta

SEQ ID NO: 109128 - DNA, 80 bp, synthetic construct
  source 1..80: mol_type = other DNA
cactattcaaacaaggtcacaggactacattataataacatatctcctaaaaagcaaacatcctttaattggcataaggt

SEQ ID NO: 109129 - DNA, 80 bp, synthetic construct; identical to SEQ ID NO: 21292
  source 1..80: mol_type = other DNA

SEQ ID NO: 109130 - DNA, 80 bp, synthetic construct
  source 1..80: mol_type = other DNA
tgaaattttcttttttttctgtaggttattggggtccaggtggtatttggttacatgagtaagctttttagtggtgattg

SEQ ID NO: 109131 - DNA, 80 bp, synthetic construct
  source 1..80: mol_type = other DNA
agctgaaatctggcccagctatcctagacacaatccaccctaaaacaatggcaaaaattaagttagaatcttacttcgta

SEQ ID NO: 109132 - DNA, 80 bp, synthetic construct
  source 1..80: mol_type = other DNA
acatggcaaaaacccatctctactaaaaacacaaaaattagctgggtgtggtggcacatgtctgtagttctcatgctgag

SEQ ID NO: 109133 - DNA, 80 bp, synthetic construct
  source 1..80: mol_type = other DNA
aatgaagattcaaagccagaaagaccacaagaaaatgtcagcatatctaaccacctaaaaattcaagaatctaaacatat

SEQ ID NO: 109134 - DNA, 80 bp, synthetic construct; identical to SEQ ID NO: 21293
  source 1..80: mol_type = other DNA

SEQ ID NO: 109135 - DNA, 80 bp, synthetic construct
  source 1..80: mol_type = other DNA
gggtaacatcacacactggggcttgtcaggggtttgggggcaaggggagggagagcattaggacaaatacctaatgcacg

SEQ ID NO: 109136 - DNA, 80 bp, synthetic construct
  source 1..80: mol_type = other DNA
taacacgccagtaacaggcctccaaaaaagggaaatctatgaaatgcctttcaaaataataatcttaaggaaactcagag

SEQ ID NO: 109137 - DNA, 80 bp, synthetic construct
  source 1..80: mol_type = other DNA
taacaattaactagattatcaggaaaaaatacagtggaagaacattctcatttaaacactatgcagctttttaaagagaa

SEQ ID NO: 109138 - DNA, 80 bp, synthetic construct; identical to SEQ ID NO: 21294
  source 1..80: mol_type = other DNA

SEQ ID NO: 109139 - DNA, 80 bp, synthetic construct
  source 1..80: mol_type = other DNA
gatctactttcttacctatcaaactgacaagtatttctgatataatatcctcactgctggctaaggcagtctcaaaactg

SEQ ID NO: 109140 - DNA, 80 bp, synthetic construct
  source 1..80: mol_type = other DNA
catctaaaatctgaatgtaaagagtaggaagtcaatgggaaaggactcagtgtgttaaacagtaataaaagtaacttcat

SEQ ID NO: 109141 - DNA, 80 bp, synthetic construct
  source 1..80: mol_type = other DNA
ctgtttttagaaatctttctttaactggattcagattttatgtagttagaggtttaaacttcaagataattacagattta

SEQ ID NO: 109142 - DNA, 80 bp, synthetic construct; identical to SEQ ID NO: 21295
  source 1..80: mol_type = other DNA

SEQ ID NO: 109143 - DNA, 80 bp, synthetic construct
  source 1..80: mol_type = other DNA
atttaagtcataatcttaccccataccttagtcataattcttattcattatccatgctagaaacatgagactcatcccaa

SEQ ID NO: 109144 - DNA, 80 bp, synthetic construct
  source 1..80: mol_type = other DNA
aagactctcctcaacaagatagagttcattcctgtcgccatgatgtcaataagctaatgactagtggatgctaagcaaat

SEQ ID NO: 109145 - DNA, 80 bp, synthetic construct; identical to SEQ ID NO: 21296
  source 1..80: mol_type = other DNA

SEQ ID NO: 109146 - DNA, 80 bp, synthetic construct
  source 1..80: mol_type = other DNA
ctgtcacatagtgggtgctatatcaaaataaaaatattttactgctctagtgatctgacattttcttaccaaccccatgt

SEQ ID NO: 109147 - DNA, 80 bp, synthetic construct
  source 1..80: mol_type = other DNA
ttcgttttcctttccctattccatgcactctttcctcttggttcaaatgcctccttctctgtaacattttctttgatctc

SEQ ID NO: 109148 - DNA, 80 bp, synthetic construct
  source 1..80: mol_type = other DNA
agtcacatagtggactctgtaatatttttgaataagtgaaattctaaaatatgttaagagctagttttatcgtctagtta

SEQ ID NO: 109149 - DNA, 80 bp, synthetic construct
  source 1..80: mol_type = other DNA
ttccacatttaatggttcttttagttgtttattcgctactcagttcaatataaatagctcacaaaataaggcaaggaaat

SEQ ID NO: 109150 - DNA, 80 bp, synthetic construct; identical to SEQ ID NO: 21297
  source 1..80: mol_type = other DNA

SEQ ID NO: 109151 - DNA, 80 bp, synthetic construct
  source 1..80: mol_type = other DNA
cagttgaagtgttgatttacagaccctgtactgtatgctagcattttattatccccctcagaaatggcatcacaacactt

SEQ ID NO: 109152 - DNA, 80 bp, synthetic construct
  source 1..80: mol_type = other DNA
ccttggtaatcactctaaaataaaaatcacctatagagcagctgcattcgcttgagcgtctctgcttagagcccacaacc

SEQ ID NO: 109153 - DNA, 80 bp, synthetic construct
  source 1..80: mol_type = other DNA
ttcggtatgctgataattaaaaacaaatggaatccaccagttggaatggccctgatgtctggcatctgagttggcatggg

SEQ ID NO: 109154 - DNA, 80 bp, synthetic construct; identical to SEQ ID NO: 21298
  source 1..80: mol_type = other DNA

SEQ ID NO: 109155 - DNA, 80 bp, synthetic construct
  source 1..80: mol_type = other DNA
gtataggctactacattcttcaattgatggctagcaaatcaattcaaccaaactctagaacatacttgactttagactac

SEQ ID NO: 109156 - DNA, 80 bp, synthetic construct
  source 1..80: mol_type = other DNA
tcacatttcttgtgcttttttgttaggtattagtgctaaaatactctatagactttaagtaggtgaacatttcaaacagc

SEQ ID NO: 109157 - DNA, 80 bp, synthetic construct
  source 1..80: mol_type = other DNA
ttttttatttttggtagctaatttgtagaagttcagttctgtggtaaggcaagatgatctctatgctttttaagagaaaa

SEQ ID NO: 109158 - DNA, 80 bp, synthetic construct; identical to SEQ ID NO: 21299
  source 1..80: mol_type = other DNA

SEQ ID NO: 109159 - DNA, 80 bp, synthetic construct
  source 1..80: mol_type = other DNA
atttacctattaaagtgaagatcaggcaaattacccaaagttgtaaagctaatctgatacttacgcgttaaatcacaaaa

SEQ ID NO: 109160 - DNA, 80 bp, synthetic construct
  source 1..80: mol_type = other DNA
tgaacattcactatggacactgtgatgcatagctttgtgcacactcttctggtttccttgtccaggtttatttttcatga

SEQ ID NO: 109161 - DNA, 80 bp, synthetic construct; identical to SEQ ID NO: 21300
  source 1..80: mol_type = other DNA

SEQ ID NO: 109162 - DNA, 80 bp, synthetic construct
  source 1..80: mol_type = other DNA
tgttattattctgaatcaccctttttaaaaacaatcctttgttttttgtgcatatgatattgttatgggttgaattgtgt

SEQ ID NO: 109163 - DNA, 80 bp, synthetic construct
  source 1..80: mol_type = other DNA
agaaggatatgcacagagggaatgcatatcctgtgaaaagacagagacacagggagagcatcatttgaagatgaaggcag

SEQ ID NO: 109164 - DNA, 80 bp, synthetic construct
  source 1..80: mol_type = other DNA
ggctaatgttaagaataatagtaataattagacttctgttgcagcccttgaaccaagttcccacctggttccctgaggac

SEQ ID NO: 109165 - DNA, 80 bp, synthetic construct; identical to SEQ ID NO: 21301
  source 1..80: mol_type = other DNA

SEQ ID NO: 109166 - DNA, 80 bp, synthetic construct
  source 1..80: mol_type = other DNA
ggtactgtgaataagtgaatgtgtattatcacctagtggctgtgaccactttttccatttacactatctgcctgccagaa

SEQ ID NO: 109167 - DNA, 80 bp, synthetic construct
  source 1..80: mol_type = other DNA
ctaccgggccatcctattgtctaggagccttcttggaaaaagttcacatatttagttatatatttaccactgggttcctg

SEQ ID NO: 109168 - DNA, 80 bp, synthetic construct
  source 1..80: mol_type = other DNA
aataaacaaacaactacatggggggggaaagccagaggaaaattagaaatacattactatttttctccagttaattggat

SEQ ID NO: 109169 - DNA, 80 bp, synthetic construct
  source 1..80: mol_type = other DNA
actaaccacagacatttgacttaaattacagtggcttaattaaagctaaatggaaagttgtctgtaggaatgtcaaatgc

SEQ ID NO: 109170 - DNA, 80 bp, synthetic construct
  source 1..80: mol_type = other DNA
tttaatttgatataagcatacaaattcagagctggtgaaaacctgagaagactatgagcccatatccctttgttcatgga

SEQ ID NO: 109171 - DNA, 80 bp, synthetic construct; identical to SEQ ID NO: 21302
  source 1..80: mol_type = other DNA

SEQ ID NO: 109172 - DNA, 80 bp, synthetic construct
  source 1..80: mol_type = other DNA
cttgatggctggagagaagagagcatacaaaaaaagtgcacagttatgagacagtgacaatgcctgttcagggactactc

SEQ ID NO: 109173 - DNA, 80 bp, synthetic construct
  source 1..80: mol_type = other DNA
gtgatcatatgccaggttggaaaatgtcacttttatctcttagcactggggcaccaacaaatggatttaagcccgtaagt

SEQ ID NO: 109174 - DNA, 80 bp, synthetic construct; identical to SEQ ID NO: 21303
  source 1..80: mol_type = other DNA

SEQ ID NO: 109175 - DNA, 80 bp, synthetic construct
  source 1..80: mol_type = other DNA
tgggatatatttgaactctaagccatgagttcaacagacagtgattctaaccctggctactcatttgaatcattagggca

SEQ ID NO: 109176 - DNA, 80 bp, synthetic construct
  source 1..80: mol_type = other DNA
tttgggtggacagtgatgtcagtcattaggacaaagaatacagacaggtgcagacattttctgcaatagatgttaatatg

SEQ ID NO: 109177 - DNA, 80 bp, synthetic construct
  source 1..80: mol_type = other DNA
taattaaccacttgggctcctaaattagttgatggcttaaatagaatgctaagggattatccaattaagaaaatactcag

SEQ ID NO: 109178 - DNA, 80 bp, synthetic construct; identical to SEQ ID NO: 21304
  source 1..80: mol_type = other DNA

SEQ ID NO: 109179 - DNA, 80 bp, synthetic construct
  source 1..80: mol_type = other DNA
ccataagcatagtaactttacatcttacttttgctatgctgatacctgaagatatacaaaagtctttgtgataatgctgc

SEQ ID NO: 109180 - DNA, 80 bp, synthetic construct
  source 1..80: mol_type = other DNA
tcattcagaatggttactattaaaaagtcaaaaacaacagatgtcatggatgcataaaatagagaacacttatacactgt

SEQ ID NO: 109181 - DNA, 80 bp, synthetic construct
  source 1..80: mol_type = other DNA
tcatcacagcactattcgcagtggcaaagtcatggaaccaaacataagtgtccatcagtggctgattgggtaaagaaaat

SEQ ID NO: 109182 - DNA, 80 bp, synthetic construct; identical to SEQ ID NO: 21305
  source 1..80: mol_type = other DNA

SEQ ID NO: 109183 - DNA, 80 bp, synthetic construct
  source 1..80: mol_type = other DNA
acgatgctgtttaagtaattagatctggtgatttgaagtttatttattgaaaagacagtggaataggccaaataatggcc

SEQ ID NO: 109184 - DNA, 80 bp, synthetic construct
  source 1..80: mol_type = other DNA
aactagtacacctatgacaagccatctgacacatctaccaagataagtactgccacatctcatttctcagttgtgttaag

SEQ ID NO: 109185 - DNA, 80 bp, synthetic construct
  source 1..80: mol_type = other DNA
gactgatgggaagagaacagagatggtatctaggaactgatagatatgtacaaatgcaagcagatcagtgaggtcaacca

SEQ ID NO: 109186 - DNA, 80 bp, synthetic construct
  source 1..80: mol_type = other DNA
agagataacaggcaaaaatgtggctctacaaattactaaacttgacacaatgattgaatccaggtaaacctacgtattct

SEQ ID NO: 109187 - DNA, 80 bp, synthetic construct; identical to SEQ ID NO: 21306
  source 1..80: mol_type = other DNA

SEQ ID NO: 109188 - DNA, 80 bp, synthetic construct
  source 1..80: mol_type = other DNA
tcaaatgatactaaagatagagaaaaaaggaattcagataagaaaactgtaagggactctcatccagttagaggtggtta

SEQ ID NO: 109189 - DNA, 80 bp, synthetic construct
  source 1..80: mol_type = other DNA
gcccaaggacacatagccagaagttaccaaatttggattctaacccagataatttaattaaagacctttctaaaagtaga

SEQ ID NO: 109190 - DNA, 80 bp, synthetic construct
  source 1..80: mol_type = other DNA
tgtgggcagagttatttatgattacaaaggaaactcagactgttgactgctagagaagactggttaacatttcttatcat

SEQ ID NO: 109191 - DNA, 80 bp, synthetic construct; identical to SEQ ID NO: 21307
  source 1..80: mol_type = other DNA

SEQ ID NO: 109192 - DNA, 80 bp, synthetic construct
  source 1..80: mol_type = other DNA
ttataaaataaaataaatttctacctcttttatgaggtactgtatgtgaccaatacaaggtcacatacagtattctgatt

SEQ ID NO: 109193 - DNA, 80 bp, synthetic construct
  source 1..80: mol_type = other DNA
ccataaactgctgcattcttccctgaggaaaatatcgaacaaaataaacagagggacaaagtagaaataaaagttagctt

SEQ ID NO: 109194 - DNA, 80 bp, synthetic construct
  source 1..80: mol_type = other DNA
atattctgtgtgattttttttttgcatccttcttgatgggtcaattatataggtgtagactcccaaggctctcccgatga

SEQ ID NO: 109195 - DNA, 80 bp, synthetic construct; identical to SEQ ID NO: 21308
  source 1..80: mol_type = other DNA

SEQ ID NO: 109196 - DNA, 80 bp, synthetic construct
  source 1..80: mol_type = other DNA
caaccataactgacatggaacatggcatacagaaaacagtatttatccacatacaagagcagttgtaaagcaaaacattt

SEQ ID NO: 109197 - DNA, 80 bp, synthetic construct
  source 1..80: mol_type = other DNA
ataagctctctctgatttccagctcagtgtggagcaactgaagctctactttcactttcttaagaaatagttacttttac

SEQ ID NO: 109198 - DNA, 80 bp, synthetic construct
  source 1..80: mol_type = other DNA
ttaataaacctactctacagcccactgctcggtctttgacatcagaattctaatatagccaggtccaaaatgcaaatggt

SEQ ID NO: 109199 - DNA, 80 bp, synthetic construct; identical to SEQ ID NO: 21309
  source 1..80: mol_type = other DNA

SEQ ID NO: 109200 - DNA, 80 bp, synthetic construct
  source 1..80: mol_type = other DNA
gaaagcacatgaagtatattttaaaaacaacagcaacaacatggcattgtattaatataaattcacgtgctagtataatt

SEQ ID NO: 109201 - DNA, 80 bp, synthetic construct
  source 1..80: mol_type = other DNA
atagttattatgagatctttatttttgccctggctcattcaaaatcatgtgaaactgaccattgggaaaacctgggcacg

SEQ ID NO: 109202 - DNA, 80 bp, synthetic construct
  source 1..80: mol_type = other DNA
cttaatttgcttctgctgcaagattgccattactggattcagttcagctgaaagtgatattaatcatcatgctgtcactg

SEQ ID NO: 109203 - DNA, 80 bp, synthetic construct; identical to SEQ ID NO: 21310
  source 1..80: mol_type = other DNA

SEQ ID NO: 109204 - DNA, 80 bp, synthetic construct
  source 1..80: mol_type = other DNA
ccatctattaaatattatttatgttatttatacatttataactgaaattaactgatatacatttataactgaaattaact

SEQ ID NO: 109205 - DNA, 80 bp, synthetic construct
  source 1..80: mol_type = other DNA
gtttttcagtcttatctttgtgtatttctaagaaaaaatagaatttataattttaaaactctgaaaatgtataaaattta

SEQ ID NO: 109206 - DNA, 80 bp, synthetic construct
  source 1..80: mol_type = other DNA
tagagttatttggaaaagcttaaacatttaatagacagagctatgttgtcaccattttcagtgctaaaattggtcacaaa

SEQ ID NO: 109207 - DNA, 80 bp, synthetic construct; identical to SEQ ID NO: 21311
  source 1..80: mol_type = other DNA

SEQ ID NO: 109208 - DNA, 80 bp, synthetic construct
  source 1..80: mol_type = other DNA
caaatatgattgctacctttgaaaagtgacttaatcttaaatatagtgttttttcttagaaaaatgctaatgaggtttac

SEQ ID NO: 109209 - DNA, 80 bp, synthetic construct
  source 1..80: mol_type = other DNA
cagaaaagacagctactagctttcattcacctgttaaggaggtaaccaccattgtgaaggttttcttcctaatttttctc

SEQ ID NO: 109210 - DNA, 80 bp, synthetic construct
  source 1..80: mol_type = other DNA
atgcccatcttcctgtctctctcaccattttgtttatttcttctctagtctccaaattttactctacagcagggtttctt

SEQ ID NO: 109211 - DNA, 80 bp, synthetic construct; identical to SEQ ID NO: 21312
  source 1..80: mol_type = other DNA

SEQ ID NO: 109212 - DNA, 80 bp, synthetic construct
  source 1..80: mol_type = other DNA
aatcactatcactgtctagacctatactatccaatgcagtagccactagacatttgtgcatattaaggacatgatatatg

SEQ ID NO: 109213 - DNA, 80 bp, synthetic construct
  source 1..80: mol_type = other DNA
cagtttggctaggctattatcccaagttattttatcgaatactaacctagagtcgcttgcaggtatattgcagatgtaat

SEQ ID NO: 109214 - DNA, 80 bp, synthetic construct
  source 1..80: mol_type = other DNA
tcctgtcatatgggttcaaaaatgcctggccagttcccacaatcgcataatccaattccttgtaataattttttaaaagt

SEQ ID NO: 109215 - DNA, 80 bp, synthetic construct; identical to SEQ ID NO: 21313
  source 1..80: mol_type = other DNA

SEQ ID NO: 109216 - DNA, 80 bp, synthetic construct
  source 1..80: mol_type = other DNA
aagatttagactggtctttggacgtactaagggagttgcctttaagagatcattccttactcctagtaggtattaattgg

SEQ ID NO: 109217 - DNA, 80 bp, synthetic construct
  source 1..80: mol_type = other DNA
gataccagctgaccattcaaaagaataaagaagggattctggagctcacacgggagaataagacgtgggttagactcttc

SEQ ID NO: 109218 - DNA, 80 bp, synthetic construct
  source 1..80: mol_type = other DNA
cggtccttgttgatcatagtagggtttcctgcaaggtaggtgtaagtttgcacatcagaaaacagatgaaagaagtacta

SEQ ID NO: 109219 - DNA, 80 bp, synthetic construct
  source 1..80: mol_type = other DNA
ggagaagggaaatgctagggtaaatgtattatctccctttcccaaatacatgaaagggaggtaactctaaagtgaaaggt

SEQ ID NO: 109220 - DNA, 80 bp, synthetic construct; identical to SEQ ID NO: 21314
  source 1..80: mol_type = other DNA

SEQ ID NO: 109221 - DNA, 80 bp, synthetic construct
  source 1..80: mol_type = other DNA
attaatatttctacagaggcaagcatggcaaaacacagcagaactagtaaagacatacacacacctacatttatttgctc

SEQ ID NO: 109222 - DNA, 80 bp, synthetic construct
  source 1..80: mol_type = other DNA
cacatggcgtgccagttctgtctccttacactttagccaggaaatgatgctattcaagctcctgtccaattcagtaacat

SEQ ID NO: 109223 - DNA, 80 bp, synthetic construct
  source 1..80: mol_type = other DNA
atcttcaaataaaattaagttttctatattatgttaatactagcttctggttatttaataatttgcaaagataggtgaat

SEQ ID NO: 109224 - DNA, 80 bp, synthetic construct; identical to SEQ ID NO: 21315
  source 1..80: mol_type = other DNA

SEQ ID NO: 109225 - DNA, 80 bp, synthetic construct
  source 1..80: mol_type = other DNA
aagttacaattatcttaatgtgttaggaggcaacaaagggaaatccctttattctactgagtcactggtagctttgccta

SEQ ID NO: 109226 - DNA, 80 bp, synthetic construct
  source 1..80: mol_type = other DNA
ctggtagggaggtatgagtgaagataagggaggaaaaagtagtatctcctcttagatccttatcgctattcatctctcac

SEQ ID NO: 109227 - DNA, 80 bp, synthetic construct
  source 1..80: mol_type = other DNA
cattcaatggcgatagcaatgaaatatatcttcctcacacagactgtttttccaaagtacaatgccaaacagaggaggag

SEQ ID NO: 109228 - DNA, 80 bp, synthetic construct
  source 1..80: mol_type = other DNA
tatgaaagatgttataaatctatagtatactaatataattaaaatatcatgcattttgataggaaaatgtagacatagat

SEQ ID NO: 109229 - DNA, 80 bp, synthetic construct; identical to SEQ ID NO: 21316
  source 1..80: mol_type = other DNA

SEQ ID NO: 109230 - DNA, 80 bp, synthetic construct
  source 1..80: mol_type = other DNA
cctaacatgatgactggaatatactagccacttgagaaatgcatactacttgaaaaaatattcaaccatgattatgagtt

SEQ ID NO: 109231 - DNA, 80 bp, synthetic construct
  source 1..80: mol_type = other DNA
gggaaagttgcaagattttactacttatggaaataagatatgccaaaggtacttataaactgcaacgattggccaggtgc

SEQ ID NO: 109232 - DNA, 80 bp, synthetic construct
  source 1..80: mol_type = other DNA
gctgggtgtggtggtgcacaactgtagtccagctacttgggaggctgagacaggaggatcccttgagcccaggaggttga

SEQ ID NO: 109233 - DNA, 80 bp, synthetic construct; identical to SEQ ID NO: 21317
  source 1..80: mol_type = other DNA

SEQ ID NO: 109234 - DNA, 80 bp, synthetic construct
  source 1..80: mol_type = other DNA
atttaatattattacatttctctagcattccttattaatgattagggtaggataatctacattctattttgtcttataac

SEQ ID NO: 109235 - DNA, 80 bp, synthetic construct
  source 1..80: mol_type = other DNA
ttctcatgacgtgtgctgaatgtcccataggaacatacaattactcaaagggtgtaatctctaaaacttcaccaaactcc

SEQ ID NO: 109236 - DNA, 80 bp, synthetic construct
  source 1..80: mol_type = other DNA
ggaagaaaggccacaggcattcaaaatgagaaggctggtagtagcagcaaccaatggaacaaaaatcagtgaaaatagat

SEQ ID NO: 109237 - DNA, 80 bp, synthetic construct
  source 1..80: mol_type = other DNA
gctgttgagtagacagatagtttgtaattttgtctaagacttacatggccagtttaaagcatgcaatttttctctattaa

SEQ ID NO: 109238 - DNA, 80 bp, synthetic construct; identical to SEQ ID NO: 21318
  source 1..80: mol_type = other DNA

SEQ ID NO: 109239 - DNA, 80 bp, synthetic construct
  source 1..80: mol_type = other DNA
caacagattaattgtaacagatgaacaagcaaatcttgttatctatttagtggctaattaaataatgccaaacacagctg

SEQ ID NO: 109240 - DNA, 80 bp, synthetic construct
  source 1..80: mol_type = other DNA
tctcccccttgaagcacctagtatgtgtatgacttaatgggcaaccactccagatacagtgataagaagatattaagaac

SEQ ID NO: 109241 - DNA, 80 bp, synthetic construct
  source 1..80: mol_type = other DNA
actaagatgatatctacctaatctcatttttgccattaaatttgttatctcaggttaattcattttttctcttcgaattt

SEQ ID NO: 109242 - DNA, 80 bp, synthetic construct; identical to SEQ ID NO: 21319
  source 1..80: mol_type = other DNA

SEQ ID NO: 109243 - DNA, 80 bp, synthetic construct
  source 1..80: mol_type = other DNA
ttaaaaggcagattttaattcattatgtctagatggagcctagattctgcatttctaaataggtcccatatgatgctaac

SEQ ID NO: 109244 - DNA, 80 bp, synthetic construct
  source 1..80: mol_type = other DNA
aaaagacctggacatcagtaaatctggcagttttgttttacaggtgtgagaactgagagccactgaagtgacttgaccat

SEQ ID NO: 109245 - DNA, 80 bp, synthetic construct
  source 1..80: mol_type = other DNA
attccaatggcttaggtcaatgcgacagtgatatatatattaacttagtttgcatcctatcattcatgttttgggatttt

SEQ ID NO: 109246 - DNA, 80 bp, synthetic construct; identical to SEQ ID NO: 21320
  source 1..80: mol_type = other DNA

SEQ ID NO: 109247 - DNA, 80 bp, synthetic construct
  source 1..80: mol_type = other DNA
gcccatttcataggccttgataaagtgcatatttcttctctctgtccaactgattggctccaacagggatatgctactaa

SEQ ID NO: 109248 - DNA, 80 bp, synthetic construct
  source 1..80: mol_type = other DNA
ctgctaggagagaaaagcctgcctgagactgaaacaaatgaaacagaggaaggaaagcaggttccagaagtgaagaaaga

SEQ ID NO: 109249 - DNA, 80 bp, synthetic construct
  source 1..80: mol_type = other DNA
gcgccacctgggctcaccgcaggctccgcctcctggcttcacgccattctcccgcctcagcctccgagtagctgggacta

SEQ ID NO: 109250 - DNA, 80 bp, synthetic construct; identical to SEQ ID NO: 21321
  source 1..80: mol_type = other DNA

SEQ ID NO: 109251 - DNA, 80 bp, synthetic construct
  source 1..80: mol_type = other DNA
cattagtttctcttgaatttgaaacaggaaacatacagaactgcagagagaagattctgaaatacattagacctagcagc

SEQ ID NO: 109252 - DNA, 80 bp, synthetic construct
  source 1..80: mol_type = other DNA
tcagagactcttttaattccttctgatgttggcaccaaaacctgatctcttgctttccttggcctattaattcaggctct

SEQ ID NO: 109253 - DNA, 80 bp, synthetic construct; identical to SEQ ID NO: 21322
  source 1..80: mol_type = other DNA

SEQ ID NO: 109254 - DNA, 80 bp, synthetic construct
  source 1..80: mol_type = other DNA
agagcgatatgcgatggtgcagttatggagatgagctttgatctagatttatttagaggagacatccaaagataaatgta

SEQ ID NO: 109255 - DNA, 80 bp, synthetic construct
  source 1..80: mol_type = other DNA
gatggatgcaatgaaagctctgacacacacatacgtctatccatcttactcccgatgacatgatacaaccttctgaatgg

SEQ ID NO: 109256 - DNA, 80 bp, synthetic construct
  source 1..80: mol_type = other DNA
gctttagggaaatttaaacatgcgactatagggggaattgtaatttgttttgctgtaagtgaggaatctcttcctctgcc

SEQ ID NO: 109257 - DNA, 80 bp, synthetic construct; identical to SEQ ID NO: 21323
  source 1..80: mol_type = other DNA

SEQ ID NO: 109258 - DNA, 80 bp, synthetic construct
  source 1..80: mol_type = other DNA
attatagatggaggtttaagtgagaataaactgtaaaaaggagatagagataggtgtatctgttaagttgcacttaaaag

SEQ ID NO: 109259 - DNA, 80 bp, synthetic construct
  source 1..80: mol_type = other DNA
tccctccctttttctttctctctgagtgtgtgcatgtttgcgtgtgtgtgtgtgtgtgtgtgtgtgtgtctgtctgtctg

SEQ ID NO: 109260 - DNA, 80 bp, synthetic construct
  source 1..80: mol_type = other DNA
tcttctttatcaaatatacaatgccccaactattctagcttatttactgccttatttgatcatgtattcattaaattttt

SEQ ID NO: 109261 - DNA, 80 bp, synthetic construct; identical to SEQ ID NO: 21324
  source 1..80: mol_type = other DNA

SEQ ID NO: 109262 - DNA, 80 bp, synthetic construct
  source 1..80: mol_type = other DNA
tagacctctgtgctttgctctcactcagaaacctaggagttacccagaaagcaaaatgtttattttctattacaatcatg

SEQ ID NO: 109263 - DNA, 80 bp, synthetic construct
  source 1..80: mol_type = other DNA
tgtaaatgttgacatttaaaaataaagttgccatatcccttttaaaaactgagttgatggactccaaacactataatatt

SEQ ID NO: 109264 - DNA, 80 bp, synthetic construct
  source 1..80: mol_type = other DNA
tctttgaattcatattttcattccacctctctcacgaaaattttacccaagagctacattatgattctctaaggaaaaaa

SEQ ID NO: 109265 - DNA, 80 bp, synthetic construct
  source 1..80: mol_type = other DNA
gccatcgaatgaatggagctttaaaatcacctatctgtggattaatgtattttacagttagaatgagacagcgttcatca

SEQ ID NO: 109266 - DNA, 80 bp, synthetic construct
  source 1..80: mol_type = other DNA
attggggcaatgttacttaatttttttgtctccttccaagtaacgttgaataccacaaagaaccaacaacagatttattt

SEQ ID NO: 109267 - DNA, 80 bp, synthetic construct; identical to SEQ ID NO: 21325
  source 1..80: mol_type = other DNA

SEQ ID NO: 109268 - DNA, 80 bp, synthetic construct
  source 1..80: mol_type = other DNA
cagtgccttggggtctcatcatgaagtgtttagtaatagaacttagtattttaaaattttgacaagttgaaaaatatgca

SEQ ID NO: 109269 - DNA, 80 bp, synthetic construct; identical to SEQ ID NO: 21326
  source 1..80: mol_type = other DNA

SEQ ID NO: 109270 - DNA, 80 bp, synthetic construct
  source 1..80: mol_type = other DNA
gaatatatatgaattgagaagggtattaatgaagagtcatttagatgtgtaaaaatcaaatgttttaaaagactatcatt

SEQ ID NO: 109271 - DNA, 80 bp, synthetic construct
  source 1..80: mol_type = other DNA
ttacctactgctttaaagctctcattgcctctatacttccatgaaagaaaagcttacacataaaaaataataattacaat

SEQ ID NO: 109272 - DNA, 80 bp, synthetic construct
  source 1..80: mol_type = other DNA
attctcctaattctgagtatgtaatctttaaggacattagtgcacatgtgttgaaggacatatatcccttagactatttt

SEQ ID NO: 109273 - DNA, 80 bp, synthetic construct
  source 1..80: mol_type = other DNA
gcttaattttaaaataatttcaaagaaaaatttaaatcaaaagaaaagattttttattaaatagtaaatatcaatttatg

SEQ ID NO: 109274 - DNA, 80 bp, synthetic construct; identical to SEQ ID NO: 21327
  source 1..80: mol_type = other DNA

SEQ ID NO: 109275 - DNA, 80 bp, synthetic construct
  source 1..80: mol_type = other DNA
atccaaagtttctaatttaacatacactaagtggattttaccccagatagtgtggggtagtcatcattttctcagggaag

SEQ ID NO: 109276 - DNA, 80 bp, synthetic construct
  source 1..80: mol_type = other DNA
actaaaacactgcaattgttttaagtctggcttgaatgttggctgttttctcacaacaaatgtacctcaagatggtacta

SEQ ID NO: 109277 - DNA, 80 bp, synthetic construct
  source 1..80: mol_type = other DNA
gcaagtaattcctctacagcacatccaggcacatccaggtaactccactccatgacagtgacacatcacacataccaact

SEQ ID NO: 109278 - DNA, 80 bp, synthetic construct; identical to SEQ ID NO: 21328
  source 1..80: mol_type = other DNA

SEQ ID NO: 109279 - DNA, 80 bp, synthetic construct
  source 1..80: mol_type = other DNA
gtaaaatatatttgaaccatgctgaaaaccaatattaccataagagaaaaataattattatcaaaggtgaaaacaactaa

SEQ ID NO: 109280 - DNA, 80 bp, synthetic construct
  source 1..80: mol_type = other DNA
tactttgcttcccaaattccagtttttaagtataaagtttgtttatatacatttatataagattgtttcatttttatgaa

SEQ ID NO: 109281 - DNA, 80 bp, synthetic construct
  source 1..80: mol_type = other DNA
agtcaaggctgaatacatgatttctgatgactaagactgaccctaaaaagtgttatctaatagatggaatcacagtgctt

SEQ ID NO: 109282 - DNA, 80 bp, synthetic construct; identical to SEQ ID NO: 21329
  source 1..80: mol_type = other DNA

SEQ ID NO: 109283 - DNA, 80 bp, synthetic construct
  source 1..80: mol_type = other DNA
gcatataaatgtgagtttgtattgtggttttatagcagagcataatgagactccctttgctgtaatgctacattaatatt

SEQ ID NO: 109284 - DNA, 80 bp, synthetic construct
  source 1..80: mol_type = other DNA
tggcagcctgttgatatgcttttagcagtcagaagtgtattcattttggtttagcttgacccaagtgctcatttgaattt

SEQ ID NO: 109285 - DNA, 80 bp, synthetic construct
  source 1..80: mol_type = other DNA
atgagatgatgtcagataacaaagaaaagaagccatagatccagtccgtggtttcctccatagcatcacgtaccagtttt

SEQ ID NO: 109286 - DNA, 80 bp, synthetic construct
  source 1..80: mol_type = other DNA
tctcctggctacaattttttgcgcagaaatagaaacttcatcttgctataatatgcatgcatgccaagaaagaaaatgcc

SEQ ID NO: 109287 - DNA, 80 bp, synthetic construct; identical to SEQ ID NO: 21330
  source 1..80: mol_type = other DNA

SEQ ID NO: 109288 - DNA, 80 bp, synthetic construct
  source 1..80: mol_type = other DNA
gaagaatctggaatagtcaagttagtgatcatatcaagctctagttggaataggttggatttatcttagtcatccctgta

SEQ ID NO: 109289 - DNA, 80 bp, synthetic construct
  source 1..80: mol_type = other DNA
cttccaatcatatgaaaactgctctgaagaggcaagcatagcctttaggatgtgattacagaggtgatctatctagaaat

SEQ ID NO: 109290 - DNA, 80 bp, synthetic construct; identical to SEQ ID NO: 21331
  source 1..80: mol_type = other DNA

SEQ ID NO: 109291 - DNA, 80 bp, synthetic construct
  source 1..80: mol_type = other DNA
gtgagagaaagacagaattccaggataacttctaagtttttggtgtgagaaactagaatgaaggaaggaaatgctctgag

SEQ ID NO: 109292 - DNA, 80 bp, synthetic construct
  source 1..80: mol_type = other DNA
agctctaactgaaaacagaaacttcagaatccaacggaagacagaaggtatcaaagccataacaatgagtgagatcacca

SEQ ID NO: 109293 - DNA, 80 bp, synthetic construct
  source 1..80: mol_type = other DNA
tgcaccagatatcaggttaatacattgtttttgaggaggacagagtgatcaactggaaaatgctatggataggtcaagaa

SEQ ID NO: 109294 - DNA, 80 bp, synthetic construct
  source 1..80: mol_type = other DNA
aggaactaggatcatagtgagtttttctgtttttaccattgttcaaataggaagaatatcccatggtttatactgatggg

SEQ ID NO: 109295 - DNA, 80 bp, synthetic construct; identical to SEQ ID NO: 21332
  source 1..80: mol_type = other DNA

SEQ ID NO: 109296 - DNA, 80 bp, synthetic construct
  source 1..80: mol_type = other DNA
gatttttatgatgagaatagattgagactatttctccatttcccttctttctaagtgttaactgaagagcttaacaataa

SEQ ID NO: 109297 - DNA, 80 bp, synthetic construct
  source 1..80: mol_type = other DNA
tatgaagttatcattgctagcttgagatcagcttctgattttctgattttcagccatgtggaccacttcttccaaaacct

SEQ ID NO: 109298 - DNA, 80 bp, synthetic construct
  source 1..80: mol_type = other DNA
gtctttttttaagaagatacttaggtaattgtattttcttagctttcatgtttccctaagtttaattatatacatgactg

SEQ ID NO: 109299 - DNA, 80 bp, synthetic construct; identical to SEQ ID NO: 21333
  source 1..80: mol_type = other DNA

SEQ ID NO: 109300 - DNA, 80 bp, synthetic construct
  source 1..80: mol_type = other DNA
tgagaacagtagctggctctctgagaaaggcaaggattaaaactggaaaaaaaaatgagtccacgatgacattgctaagg

SEQ ID NO: 109301 - DNA, 80 bp, synthetic construct
  source 1..80: mol_type = other DNA
gtcagtaattggattcttggcactgatgaaagagtgccaagagagacaagagaggccaagaaaagtttaagtaagatttt

SEQ ID NO: 109302 - DNA, 80 bp, synthetic construct; identical to SEQ ID NO: 21334
  source 1..80: mol_type = other DNA

SEQ ID NO: 109303 - DNA, 80 bp, synthetic construct
  source 1..80: mol_type = other DNA
tatttgtttcaatttttgagtgttttggaggactccaattttgcacccatggtacttaactcacttttctctagtcctgg

SEQ ID NO: 109304 - DNA, 80 bp, synthetic construct
  source 1..80: mol_type = other DNA
tcccaaagtcactattccaaatcaagacctcaactttccagtgcctgttattcctctattcaaactctctgtactccaat

SEQ ID NO: 109305 - DNA, 80 bp, synthetic construct
  source 1..80: mol_type = other DNA
acgtgaagaaataagcaagattgtctgttgaatgaccaaaatgttcttttcagcttgctagccagaactaatagcttccc

SEQ ID NO: 109306 - DNA, 80 bp, synthetic construct; identical to SEQ ID NO: 21335
  source 1..80: mol_type = other DNA

SEQ ID NO: 109307 - DNA, 80 bp, synthetic construct
  source 1..80: mol_type = other DNA
aaagcatgtgtattagtccgtttccatactgctgataaagacacacctgagactgggtaatttataaagaaaaagaggta

SEQ ID NO: 109308 - DNA, 80 bp, synthetic construct
  source 1..80: mol_type = other DNA
aagaacagtatgcgagaaactgtccccattgattcaattatctcccactggggccctcccacaacatgtgggaatcatgg

SEQ ID NO: 109309 - DNA, 80 bp, synthetic construct
  source 1..80: mol_type = other DNA
atattagcatgagatcacttagtcaccacgccctcatagcgaaccttggtaaggtccatgaaatccaaagactgttttca

SEQ ID NO: 109310 - DNA, 80 bp, synthetic construct; identical to SEQ ID NO: 21336
  source 1..80: mol_type = other DNA

SEQ ID NO: 109311 - DNA, 80 bp, synthetic construct
  source 1..80: mol_type = other DNA
atttttgcttctgttggtgaaaattttatcaagttaagaaaaattttagcaaattatgtgtcatttaatatgccctgagt

SEQ ID NO: 109312 - DNA, 80 bp, synthetic construct
  source 1..80: mol_type = other DNA
gaaaaacaaaacaaaaatgtttttaaaatctgaagtggtgggtcagtatatgcataaaacaatgctctttccactaagtc

SEQ ID NO: 109313 - DNA, 80 bp, synthetic construct
  source 1..80: mol_type = other DNA
acaagaagcttgcacagtgaatttaatagtcttctgagactttgggtcctggagttttcagcatcaacaatactaggcac

SEQ ID NO: 109314 - DNA, 80 bp, synthetic construct; identical to SEQ ID NO: 21337
  source 1..80: mol_type = other DNA

SEQ ID NO: 109315 - DNA, 80 bp, synthetic construct
  source 1..80: mol_type = other DNA
tgcaacacctttattcctctgtatttaacccctaagatgagtttatatcctgccagtggacgtttctaaatgtatagtac

SEQ ID NO: 109316 - DNA, 80 bp, synthetic construct
  source 1..80: mol_type = other DNA
catgttccaaaaatagattttccacacagaagcattttaagagaggctcattttttgagatcctctttttatattcactt

SEQ ID NO: 109317 - DNA, 80 bp, synthetic construct
  source 1..80: mol_type = other DNA
gataattttgtttacagtataaaagagtatttcaaggatcctcacatggacagaaatgtggaataaaagctatgctgtaa

SEQ ID NO: 109318 - DNA, 80 bp, synthetic construct
  source 1..80: mol_type = other DNA
agaagagtatgaggaaaccacattttcatatatttaaatgccttactttacaaatgagtgaatactttgctattgccata

SEQ ID NO: 109319 - DNA, 80 bp, synthetic construct; identical to SEQ ID NO: 21338
  source 1..80: mol_type = other DNA

SEQ ID NO: 109320 - DNA, 80 bp, synthetic construct; identical to SEQ ID NO: 21339
  source 1..80: mol_type = other DNA

SEQ ID NO: 109321 - DNA, 80 bp, synthetic construct
  source 1..80: mol_type = other DNA
accacaaaagaagtgaaagtggccggtccctgccttaactgatgacattaccttgtgaaattccttctcctggctcatcc

SEQ ID NO: 109322 - DNA, 80 bp, synthetic construct
  source 1..80: mol_type = other DNA
ctgcacccaggtgaaataaacagccttgttgctcactcaaagcctgtttggtggtctcttcacacagacatgagtgaaat

SEQ ID NO: 109323 - DNA, 80 bp, synthetic construct
  source 1..80: mol_type = other DNA
cctctttctactctcttctccaacctctctcactatccttcaacctctttctcctttcaatcttggcgccacacttcaat

SEQ ID NO: 109324 - DNA, 80 bp, synthetic construct
  source 1..80: mol_type = other DNA
acgtttcagaggtgtgtgaccacgtgggaacgcctgtcttggtccttcacccttagcagcaagcaccgcttttctggggg

SEQ ID NO: 109325 - DNA, 80 bp, synthetic construct; identical to SEQ ID NO: 21340
  source 1..80: mol_type = other DNA

SEQ ID NO: 109326 - DNA, 80 bp, synthetic construct
  source 1..80: mol_type = other DNA
ccctagtctctgttcccaatgcagcttgtcccaaacttccttctttccctcccgcctgtcccctcagtcccaaccccaag

SEQ ID NO: 109327 - DNA, 80 bp, synthetic construct
  source 1..80: mol_type = other DNA
acccggtccggcttacagttgcattctgtgactagccctcccccacctgcccagcaatttcctcttaaaaaggtggctgg

SEQ ID NO: 109328 - DNA, 80 bp, synthetic construct
  source 1..80: mol_type = other DNA
ggccatcttattctcaatatacattttattacccaatctgctcccgacattaaataagactccaaaaattaaattccagc

SEQ ID NO: 109329 - DNA, 80 bp, synthetic construct
  source 1..80: mol_type = other DNA
tgaactgcagctgccagggattcctccagaacctcctcccccaggaccttgccacaagtgccggaaatccggccactggg

SEQ ID NO: 109330 - DNA, 80 bp, synthetic construct; identical to SEQ ID NO: 21341
  source 1..80: mol_type = other DNA

SEQ ID NO: 109331 - DNA, 80 bp, synthetic construct
  source 1..80: mol_type = other DNA
tcttttaagcactccttttaattatccccacctgcccagttccctattaggccgagacactttaactaaattatctgctt

SEQ ID NO: 109332 - DNA, 80 bp, synthetic construct
  source 1..80: mol_type = other DNA
attaaaacctaatcacccttaccccaatcaatgccaatatcccatcccacagcatgctttgaaaggattaaagcctgtta

SEQ ID NO: 109333 - DNA, 80 bp, synthetic construct; identical to SEQ ID NO: 21342
  source 1..80: mol_type = other DNA

SEQ ID NO: 109334 - DNA, 80 bp, synthetic construct
  source 1..80: mol_type = other DNA
tgtagcctttctgtccaaacaacttgaccttactgttttagcctagcccttatgtctgcgtgcggcggctgccgctgctt

SEQ ID NO: 109335 - DNA, 80 bp, synthetic construct
  source 1..80: mol_type = other DNA
cctcactcttacaaaggggctacacatcaatatttatactgactctaaatatgccttccatatcctgcaccaccaagctg

SEQ ID NO: 109336 - DNA, 80 bp, synthetic construct
  source 1..80: mol_type = other DNA
gcttatcctgataaggtagctaaaaaagcagccatcaaaagggctcagatcccatcgctcaggacaatgcttatgctgat

SEQ ID NO: 109337 - DNA, 80 bp, synthetic construct; identical to SEQ ID NO: 21343
  source 1..80: mol_type = other DNA

SEQ ID NO: 109338 - DNA, 80 bp, synthetic construct
  source 1..80: mol_type = other DNA
tgactttactcacatgccccgagtcagaaaactaaaataactcttggtctaggtagacactttcactggatgggtagagg

SEQ ID NO: 109339 - DNA, 80 bp, synthetic construct
  source 1..80: mol_type = other DNA
aaacatttatataccttacaatcctcaatcttcaggaatggtagaacggactaatggtcttttaaaaacacacctcacca

SEQ ID NO: 109340 - DNA, 80 bp, synthetic construct
  source 1..80: mol_type = other DNA
gcccaacttgaactgcaccccaaaaacttggatagagcctaaaagctcaccaaccaagcaagtaattatgctcaaccccc

SEQ ID NO: 109341 - DNA, 80 bp, synthetic construct
  source 1..80: mol_type = other DNA
ccacaatatcaccccttaccacaggatcttccttcagcttaatctctcccactctaggttcccatgccgccccaatccct

SEQ ID NO: 109342 - DNA, 80 bp, synthetic construct; identical to SEQ ID NO: 21344
  source 1..80: mol_type = other DNA

SEQ ID NO: 109343 - DNA, 80 bp, synthetic construct
  source 1..80: mol_type = other DNA
aaatggccgcatccctatctcccttcgctgactctcttttcagactcagcccgcctgcacccaggtgaaataaacagcct

SEQ ID NO: 109344 - DNA, 80 bp, synthetic construct
  source 1..80: mol_type = other DNA
caccccttccatgatgtgagaacacagcaagaagcctatgagctacagagtaggttctcacagataccaaaactgctggc

SEQ ID NO: 109345 - DNA, 80 bp, synthetic construct
  source 1..80: mol_type = other DNA
gaagtacattggattctaaaagataaaatccatttgatttgcaattttgaaaaaataaaatacttgcatctgcaagtatt

SEQ ID NO: 109346 - DNA, 80 bp, synthetic construct; identical to SEQ ID NO: 21345
  source 1..80: mol_type = other DNA

SEQ ID NO: 109347 - DNA, 80 bp, synthetic construct
  source 1..80: mol_type = other DNA
ctaagtttactgatactcaactattacttcttgaggcaaaaggaacattactgaatgcaaatagatgtatatttcacctc

SEQ ID NO: 109348 - DNA, 80 bp, synthetic construct
  source 1..80: mol_type = other DNA
tatccctgtcaagtatccagatgaaaattagggcatcatattgtacttttattaataaatatgtataaaaggtgtgacta

SEQ ID NO: 109349 - DNA, 80 bp, synthetic construct
  source 1..80: mol_type = other DNA
tggcataaaagtcaaaatattatactactccagttggatgatttacttggatcaccatattataaatttaacagattagt

SEQ ID NO: 109350 - DNA, 80 bp, synthetic construct; identical to SEQ ID NO: 21346
  source 1..80: mol_type = other DNA

SEQ ID NO: 109351 - DNA, 80 bp, synthetic construct
  source 1..80: mol_type = other DNA
acactttttattagagtctgggaaatattgaattatagaactctttgcttccttcaggtactcatagacagactgaagtt

SEQ ID NO: 109352 - DNA, 80 bp, synthetic construct
  source 1..80: mol_type = other DNA
gtgctccttgaaaactcagtacacatgagagttgatagagtcctaaatgttgcatttagtgtttcagtcttccatgtttc

SEQ ID NO: 109353 - DNA, 80 bp, synthetic construct; identical to SEQ ID NO: 21347
  source 1..80: mol_type = other DNA

SEQ ID NO: 109354 - DNA, 80 bp, synthetic construct
  source 1..80: mol_type = other DNA
tcagattacagatcttacttcctggtaataagattcaaattcaagttacatttaatgagtccctcctatgtgccaggcat

SEQ ID NO: 109355 - DNA, 80 bp, synthetic construct
  source 1..80: mol_type = other DNA
aatgatgttttcctctaatggatgaggatgctaatgaatgatgatccttgttcttaggaaggaaaagagttaccacattc

SEQ ID NO: 109356 - DNA, 80 bp, synthetic construct
  source 1..80: mol_type = other DNA
accaaagcctacaaattctggccccaaaagatcagaatacataatcaaggcaccccttcattttctgagagggaggtctt

SEQ ID NO: 109357 - DNA, 80 bp, synthetic construct; identical to SEQ ID NO: 21348
  source 1..80: mol_type = other DNA

SEQ ID NO: 109358 - DNA, 80 bp, synthetic construct
  source 1..80: mol_type = other DNA
ttggaaacaagacatttttgcaagttttggaaggcacgaatgtggcaataatgaagccattatttattgtctgaaggttg

SEQ ID NO: 109359 - DNA, 80 bp, synthetic construct
  source 1..80: mol_type = other DNA
gcgtcaatttatcctgcagctcatccgcataattgtaatttgtggtggtgagagacaaacaagtcttccactttgttctt

SEQ ID NO: 109360 - DNA, 80 bp, synthetic construct
  source 1..80: mol_type = other DNA
atgtaattcagagttgctttcagctattgtgtcaaacattgacagataggcatagtattgtttgaatattatttggatgt

SEQ ID NO: 109361 - DNA, 80 bp, synthetic construct
  source 1..80: mol_type = other DNA
tcctagtcatgttagcttgtaggttcatagagctgaataacgaacccaaatcatctaaatgaaccacaaataaaagccaa

SEQ ID NO: 109362 - DNA, 80 bp, synthetic construct; identical to SEQ ID NO: 21349
  source 1..80: mol_type = other DNA

SEQ ID NO: 109363 - DNA, 80 bp, synthetic construct
  source 1..80: mol_type = other DNA
agtataatttacattttgaaactgttattgaagccataatttatatagttctttcatttttataatacacatatttcaag

SEQ ID NO: 109364 - DNA, 80 bp, synthetic construct
  source 1..80: mol_type = other DNA
gtagagcttccattggagagctgcaattaatttctatgggcaatgcctatgttactggcatttcatctgatagggaaata

SEQ ID NO: 109365 - DNA, 80 bp, synthetic construct
  source 1..80: mol_type = other DNA
attagacatttatgactctggataaatagcccttttgctttctttgatatcacgggacttttctctacttgttagatgag

SEQ ID NO: 109366 - DNA, 80 bp, synthetic construct; identical to SEQ ID NO: 21350
  source 1..80: mol_type = other DNA

SEQ ID NO: 109367 - DNA, 80 bp, synthetic construct
  source 1..80: mol_type = other DNA
gaggaaagtaccaagggaattggctaaaccattcttcaaaaatccatctctattaaacaataatcttccaagaggcccca

SEQ ID NO: 109368 - DNA, 80 bp, synthetic construct
  source 1..80: mol_type = other DNA
attaactccaaagtccaaagtccacagtctcatctggaaataaattccttccacctatgagcctgtaaaatcaaaagaag

SEQ ID NO: 109369 - DNA, 80 bp, synthetic construct; identical to SEQ ID NO: 21351
  source 1..80: mol_type = other DNA

SEQ ID NO: 109370 - DNA, 80 bp, synthetic construct
  source 1..80: mol_type = other DNA
ggtgggtcctccaaacacacatttcccctctgcactgccctaatagaggttctctgtttgggctctgccactgcaacaag

SEQ ID NO: 109371 - DNA, 80 bp, synthetic construct
  source 1..80: mol_type = other DNA
gcacctgtggccttttaagccacagctggacccagagcagccaaaatataggcagcactcttctgaggctggccagggca

SEQ ID NO: 109372 - DNA, 80 bp, synthetic construct
  source 1..80: mol_type = other DNA
gctatcagcacgtagcttctttttagttacgcaaatttctctagcaagtggtttctccacagcctgcttgaattcctctc

SEQ ID NO: 109373 - DNA, 80 bp, synthetic construct; identical to SEQ ID NO: 21352
  source 1..80: mol_type = other DNA

SEQ ID NO: 109374 - DNA, 80 bp, synthetic construct
  source 1..80: mol_type = other DNA
agaagtttcaatctttccttcctcttcctatcttcttctgagcaatccaaactctttgaacttctgcccattacccagtt

SEQ ID NO: 109375 - DNA, 80 bp, synthetic construct
  source 1..80: mol_type = other DNA
agactgggtaatttataaacaaaataggtttaataggctcacagttatacaggttgtacaggaatcatgatgctggtgtc

SEQ ID NO: 109376 - DNA, 80 bp, synthetic construct
  source 1..80: mol_type = other DNA
agcaccaaggggacagtgccaaaccactcactaaaaaatgcatccctgtgatccagtcacctcctgctaggcccatgtcc

SEQ ID NO: 109377 - DNA, 80 bp, synthetic construct; identical to SEQ ID NO: 21353
  source 1..80: mol_type = other DNA

SEQ ID NO: 109378 - DNA, 80 bp, synthetic construct
  source 1..80: mol_type = other DNA
aaagtgataagaataaattcactcatctagtcatgtaacatttactcagcacttggctgattcctttccttagggagctc

SEQ ID NO: 109379 - DNA, 80 bp, synthetic construct
  source 1..80: mol_type = other DNA
ttgtctggcaaggacacttaggaccagatgacagcagggcttaaaaatactttaaaatattttccatttgtccaaaagtg

SEQ ID NO: 109380 - DNA, 80 bp, synthetic construct
  source 1..80: mol_type = other DNA
atgaactgcaacattcaggctttgttcagctcttgcaaataaggatatcaatttcattggaaatcaataagtaccaccga

SEQ ID NO: 109381 - DNA, 80 bp, synthetic construct
  source 1..80: mol_type = other DNA
cctcacactaagatgaaacagaaaccaagcaggaactggaggggacactgtttctttccatttgaattaattttaatttt

SEQ ID NO: 109382 - DNA, 80 bp, synthetic construct; identical to SEQ ID NO: 21354
  source 1..80: mol_type = other DNA

SEQ ID NO: 109383 - DNA, 80 bp, synthetic construct
  source 1..80: mol_type = other DNA
ttcctcagcatttactattctccctaaaactcgtgcgctcatataatcagtgtttctcatctcctaagtcctctgaggga

SEQ ID NO: 109384 - DNA, 80 bp, synthetic construct
  source 1..80: mol_type = other DNA
ctaagataatgatgttagaaagtcttactatatccagtacctcttttattcctgattttaagagtccacatgttcatgag

SEQ ID NO: 109385 - DNA, 80 bp, synthetic construct
  source 1..80: mol_type = other DNA
ttgtcttttacttttttttactaggcaatatatcagaagtgtgttttattgccattctgtatttctcaaaataccattta

SEQ ID NO: 109386 - DNA, 80 bp, synthetic construct; identical to SEQ ID NO: 21355
  source 1..80: mol_type = other DNA

SEQ ID NO: 109387 - DNA, 80 bp, synthetic construct
  source 1..80: mol_type = other DNA
cttttcttgtggatttttcctccatttttctgtaaacctccttttggtggtttctaaaattgcatacatacacacatatg

SEQ ID NO: 109388 - DNA, 80 bp, synthetic construct
  source 1..80: mol_type = other DNA
tggagagaaaacatgtctcattatctgggctacacttgactcgtagaaagttaaatctagaagtaactgagagatcatct

SEQ ID NO: 109389 - DNA, 80 bp, synthetic construct
  source 1..80: mol_type = other DNA
aagcaaagttaaaaaacatttttgtgtattaaaatacagaccatattgtctataataatttaagaattacatgccaagaa

SEQ ID NO: 109390 - DNA, 80 bp, synthetic construct; identical to SEQ ID NO: 21356
  source 1..80: mol_type = other DNA

SEQ ID NO: 109391 - DNA, 80 bp, synthetic construct
  source 1..80: mol_type = other DNA
aatggctagaaggtcgctattacactacatctctgagtgagaagcatctagatctgatgaatgagattggtaagactcaa

SEQ ID NO: 109392 - DNA, 80 bp, synthetic construct
  source 1..80: mol_type = other DNA
tgctaccagcacaactatgactctcactacaactacaaatatcactctaagaaaaggctagaaaggcaggattaacctcg

SEQ ID NO: 109393 - DNA, 80 bp, synthetic construct
  source 1..80: mol_type = other DNA
gtatcctttccaatcaattaattgactgcttgtaatacaggcaaagaggaacatacagtataatttatccgtacaagtag

SEQ ID NO: 109394 - DNA, 80 bp, synthetic construct; identical to SEQ ID NO: 21357
  source 1..80: mol_type = other DNA

SEQ ID NO: 109395 - DNA, 80 bp, synthetic construct
  source 1..80: mol_type = other DNA
cacatactaacaggtggtaaccaaacaaaattagttttttagttattttttagataacagtgataaatttagccccatat

SEQ ID NO: 109396 - DNA, 80 bp, synthetic construct
  source 1..80: mol_type = other DNA
aaaatgatagcaagataaaaaaaatacttctaaaacccagatttcacaaactgcacttgaggtggtgctcaagaaggaaa

SEQ ID NO: 109397 - DNA, 80 bp, synthetic construct
  source 1..80: mol_type = other DNA
caagtggggctacaagtgaatcaaacctttggaataatgatttgcagcaaagtaaaccaattatgagtgtttaggactgg

SEQ ID NO: 109398 - DNA, 80 bp, synthetic construct; identical to SEQ ID NO: 21358
  source 1..80: mol_type = other DNA

SEQ ID NO: 109399 - DNA, 80 bp, synthetic construct
  source 1..80: mol_type = other DNA
gttttctaaacaactgacataatatgaattctaaatttgtattcacttaatgatccttccaatccaattatggtacaatt

SEQ ID NO: 109400 - DNA, 80 bp, synthetic construct
  source 1..80: mol_type = other DNA
gtaatctgaaggtcatccttcttaaagaaaattatgtgttgcccttgttatgaaacacattaagttgtacctttcaattt

SEQ ID NO: 109401 - DNA, 80 bp, synthetic construct
  source 1..80: mol_type = other DNA
tagttattgatatggcagaaaaaatgagaggtaaatattaccgagcaatttgacatgggctatgcctcttgaaagttggt

SEQ ID NO: 109402 - DNA, 80 bp, synthetic construct; identical to SEQ ID NO: 21359
  source 1..80: mol_type = other DNA

SEQ ID NO: 109403 - DNA, 80 bp, synthetic construct
  source 1..80: mol_type = other DNA
attattctttatttttcctgtgggacgctgacaatacaatctctttcaggatgctcaaggaagacacctacattctagaa

SEQ ID NO: 109404 - DNA, 80 bp, synthetic construct
  source 1..80: mol_type = other DNA
agcaaatgagagaaaggaagtatatactactgatggcattatatgtgttattcccaaattactttaagaacataattccc

SEQ ID NO: 109405 - DNA, 80 bp, synthetic construct
  source 1..80: mol_type = other DNA
gtgtttacaaaatgtaaactagtctctggacacttttaatgaatgccctaaattgccaccttttctcccaggtttttggg

SEQ ID NO: 109406 - DNA, 80 bp, synthetic construct
  source 1..80: mol_type = other DNA
tattttaacattatctggcactccttcctacctacccactccattcactcttccattgagtggaacggatgaggagtctc

SEQ ID NO: 109407 - DNA, 80 bp, synthetic construct; identical to SEQ ID NO: 21360
  source 1..80: mol_type = other DNA

SEQ ID NO: 109408 - DNA, 80 bp, synthetic construct
  source 1..80: mol_type = other DNA
ttacaggagttaaaataagaaggaacattagcactgttgagaagtaggctatcaaatcacagcaagtgccttcatttgct

SEQ ID NO: 109409 - DNA, 80 bp, synthetic construct
  source 1..80: mol_type = other DNA
acccaacaattattttttttctgctcctgtccctcctgccaccctccaccctcaagtaggccccagtgtctgttgttccc

SEQ ID NO: 109410 - DNA, 80 bp, synthetic construct
  source 1..80: mol_type = other DNA
agtattccatggtgtatatgtaccacattttctttatttaatccgtcattggtgggcatttaggttgatttcatgtcttt

SEQ ID NO: 109411 - DNA, 80 bp, synthetic construct; identical to SEQ ID NO: 21361
  source 1..80: mol_type = other DNA

SEQ ID NO: 109412 - DNA, 80 bp, synthetic construct
  source 1..80: mol_type = other DNA
agttgtttgttgtcctcttgtaaatttaagttatttatagatgctggatattggacctttgtcagatacatagtttgcaa

SEQ ID NO: 109413 - DNA, 80 bp, synthetic construct
  source 1..80: mol_type = other DNA
caggatgatattgcctaggttgttttccagattttttgtagttttgggttttacatttaagtctttaatccatcttgagt

SEQ ID NO: 109414 - DNA, 80 bp, synthetic construct; identical to SEQ ID NO: 21362
  source 1..80: mol_type = other DNA

SEQ ID NO: 109415 - DNA, 80 bp, synthetic construct
  source 1..80: mol_type = other DNA
tggtagtttgatagaaacagcactgaatctataaattgccttgggcagtatggccattttaatgatattatttttatccg

SEQ ID NO: 109416 - DNA, 80 bp, synthetic construct
  source 1..80: mol_type = other DNA
tggctgtcagcttggctgttgttggtgtataggaatgctactgatttttgtacattactttgtattctgacattttgctg

SEQ ID NO: 109417 - DNA, 80 bp, synthetic construct
  source 1..80: mol_type = other DNA
tgaagaagagtggtaggagagagcatcattttcttgtgctggttttcaagggaaatgcttccagattttgccccatcagt

SEQ ID NO: 109418 - DNA, 80 bp, synthetic construct
  source 1..80: mol_type = other DNA
ttccatttatttgatgaatcaaatttattgatttgcatatgttgaaccaacctggcatcacagggatgaagactacttga

SEQ ID NO: 109419 - DNA, 80 bp, synthetic construct; identical to SEQ ID NO: 21363
  source 1..80: mol_type = other DNA

SEQ ID NO: 109420 - DNA, 80 bp, synthetic construct
  source 1..80: mol_type = other DNA
ctgaaaagaaggtgccttactttcctttcaccttccaccatgattgtaactttcctgaggcctccccagctatgctgaac

SEQ ID NO: 109421 - DNA, 80 bp, synthetic construct
  source 1..80: mol_type = other DNA
ccaggctttttttggtcagtagggtacttgttactgaccatttcagtccatttcagagctcgttattggtctttgacttt

SEQ ID NO: 109422 - DNA, 80 bp, synthetic construct
  source 1..80: mol_type = other DNA
atttaaaatttagaacccccaaaaaacactttaagccttgagaaagatgggactgtgatctgagttacctagagttacaa

SEQ ID NO: 109423 - DNA, 80 bp, synthetic construct; identical to SEQ ID NO: 21364
  source 1..80: mol_type = other DNA

SEQ ID NO: 109424 - DNA, 80 bp, synthetic construct
  source 1..80: mol_type = other DNA
aacctctctactttggaacactgacttcattcctttgtagttggtgtttccaagtggtccatcctcacagtttgcacttg

SEQ ID NO: 109425 - DNA, 80 bp, synthetic construct
  source 1..80: mol_type = other DNA
aacagcctcccaggcatctgagactacaaggaagagctgccacacttggctagaattcattttttgaagccagagatatt

SEQ ID NO: 109426 - DNA, 80 bp, synthetic construct; identical to SEQ ID NO: 21365
  source 1..80: mol_type = other DNA

SEQ ID NO: 109427 - DNA, 80 bp, synthetic construct
  source 1..80: mol_type = other DNA
atcctttcatagcacttagcatagcacattttgcacagttaaggccccaatagttattaaatatgagaaatattagaagt

SEQ ID NO: 109428 - DNA, 80 bp, synthetic construct
  source 1..80: mol_type = other DNA
tgctagtggtagaagtaaaaacatgtctgttcaagagaatctcataagaactgcaaagttttgctggtccaaagaaggct

SEQ ID NO: 109429 - DNA, 80 bp, synthetic construct
  source 1..80: mol_type = other DNA
tattaaaccttttaaatttccaagtggcaacatctgggagaggtttccaaaaccagattgaagagattaaatgggtagat

SEQ ID NO: 109430 - DNA, 80 bp, synthetic construct; identical to SEQ ID NO: 21366
  source 1..80: mol_type = other DNA

SEQ ID NO: 109431 - DNA, 80 bp, synthetic construct
  source 1..80: mol_type = other DNA
tcaggtttactttggagttccctgggcagagaggaaggagccattcagtaagttggggatttagagttttatttttactt

SEQ ID NO: 109432 - DNA, 80 bp, synthetic construct; identical to SEQ ID NO: 21367
  source 1..80: mol_type = other DNA

SEQ ID NO: 109433 - DNA, 80 bp, synthetic construct
  source 1..80: mol_type = other DNA
taaaataacagaaatcatggccaggattccttattaccactacatgcccaagtagcctaaatcaaaatgtcagagggcac

SEQ ID NO: 109434 - DNA, 80 bp, synthetic construct
  source 1..80: mol_type = other DNA
aggatttgcccaactttgtgaattagaagtttgcggaaagaatctgcagaaaatctcccaaattatgtgggttcaatctc

SEQ ID NO: 109435 - DNA, 80 bp, synthetic construct; identical to SEQ ID NO: 21368
  source 1..80: mol_type = other DNA

SEQ ID NO: 109436 - DNA, 80 bp, synthetic construct
  source 1..80: mol_type = other DNA
tcctgctgctttaccccacatggagtcataatcacactattgtgtcacagtagattctattttattacctgtaagagagt

SEQ ID NO: 109437 - DNA, 80 bp, synthetic construct
  source 1..80: mol_type = other DNA
tggaagtgcaagaactaagacccaagtttcttttttaaattttacttttttcagtattcaggcaaatgtgatgaagcaac

SEQ ID NO: 109438 - DNA, 80 bp, synthetic construct
  source 1..80: mol_type = other DNA
cccaacccccaggccacggacccattaggaaccaggtcacacagcaggaggtgagcagcgggtgggcaggcaacacttta

SEQ ID NO: 109439 - DNA, 80 bp, synthetic construct; identical to SEQ ID NO: 21369
  source 1..80: mol_type = other DNA

SEQ ID NO: 109440 - DNA, 80 bp, synthetic construct
  source 1..80: mol_type = other DNA
atagtgaaaccccgtctctactaaaaatacaaaaattagccgggtgtgtggcacatgcctatagtcccaactacttggga

SEQ ID NO: 109441 - DNA, 80 bp, synthetic construct
  source 1..80: mol_type = other DNA
tgtgcttaactcatcctgaaaccatgtcccctgccctggcctgtggaaaaattgtcttccacaaaactggtctctggtgc

SEQ ID NO: 109442 - DNA, 80 bp, synthetic construct; identical to SEQ ID NO: 21370
  source 1..80: mol_type = other DNA

SEQ ID NO: 109443 - DNA, 80 bp, synthetic construct
  source 1..80: mol_type = other DNA
gcagtggcacgatcttggctcactgcaacctccacctcctgggttcaagcaattctcctgcctcagcctcctgagtagct

SEQ ID NO: 109444 - DNA, 80 bp, synthetic construct
  source 1..80: mol_type = other DNA
tccagtcccaaatctttattaagttatttaaaaggtttagaacagatcatgatagttttgcccaaacctctatctttctg

SEQ ID NO: 109445 - DNA, 80 bp, synthetic construct
  source 1..80: mol_type = other DNA
atgagcttgaagctcctttatgtgcttctgaaaagaacattaaggtattcatgcccatatttcaaaagagcaagcaatta

SEQ ID NO: 109446 - DNA, 80 bp, synthetic construct
  source 1..80: mol_type = other DNA
aattttctgaagtctactcattatcagagttttcaaagtactgtgtattgcttagtcttcaacattctcatcctgctcgt

SEQ ID NO: 109447 - DNA, 80 bp, synthetic construct; identical to SEQ ID NO: 21371
  source 1..80: mol_type = other DNA

SEQ ID NO: 109448 - DNA, 80 bp, synthetic construct
  source 1..80: mol_type = other DNA
tctaggcattgggactgtcagtattacaaggaacagtgaattccctatcggatcatttcaaatagcttatctgaatagga

SEQ ID NO: 109449 - DNA, 80 bp, synthetic construct
  source 1..80: mol_type = other DNA
gctttataaaattgtggttgctttagagctcatgtttttggaacctactaagcagcctcccttgaatagtattgatctag

SEQ ID NO: 109450 - DNA, 80 bp, synthetic construct
  source 1..80: mol_type = other DNA
ggatattaaactcattggttcagtgttagaggaagttcttcaaaaatagcatcaattattttacccatgttacttctaat

SEQ ID NO: 109451 - DNA, 80 bp, synthetic construct; identical to SEQ ID NO: 21372
  source 1..80: mol_type = other DNA

SEQ ID NO: 109452 - DNA, 80 bp, synthetic construct
  source 1..80: mol_type = other DNA
aagccacaatggctcaaagagcacttcggtaataaaatgaggccatcttatgagtagggcttaacaaaacttaaccatgg

SEQ ID NO: 109453 - DNA, 80 bp, synthetic construct
  source 1..80: mol_type = other DNA
tctggaggaagcggaagtctgaaatcaaagtattgatagggttctttctgaggcctgtgagggaagaatctgtttaagct

SEQ ID NO: 109454 - DNA, 80 bp, synthetic construct
  source 1..80: mol_type = other DNA
ctatgaccaattaagatcatactctgagtttctgggaattagaacttcaacataaggttgtgggaagatacaattcaacc

SEQ ID NO: 109455 - DNA, 80 bp, synthetic construct; identical to SEQ ID NO: 21373
  source 1..80: mol_type = other DNA

SEQ ID NO: 109456 - DNA, 80 bp, synthetic construct
  source 1..80: mol_type = other DNA
gcaaacaccataggtcagtgaggcatatgccatcaacatattttaatgaaatgataatgtcagaattcagagtaactaca

SEQ ID NO: 109457 - DNA, 80 bp, synthetic construct
  source 1..80: mol_type = other DNA
tcaaaaatcaatatttgtggatgcctaatccagactaatccagaccaaggcactaactctcttcaattctgtgaaggata

SEQ ID NO: 109458 - DNA, 80 bp, synthetic construct
  source 1..80: mol_type = other DNA
atgatttaaaaatgtccaaagcatgaatgttaccaaacagaatgaaattctggttatgtttgttaaatgattctacaata

SEQ ID NO: 109459 - DNA, 80 bp, synthetic construct; identical to SEQ ID NO: 21374
  source 1..80: mol_type = other DNA

SEQ ID NO: 109460 - DNA, 80 bp, synthetic construct
  source 1..80: mol_type = other DNA
gaattcataataatgttaaaatgtgtgttatagcaaaatagcaacatttcctggtgtcctgcaaattatttctcatgaaa

SEQ ID NO: 109461 - DNA, 80 bp, synthetic construct
  source 1..80: mol_type = other DNA
atgaaacaggattttattattttttatatgacactttctgcagtcatatccttctcagactgtacgatctaaagcaagct

SEQ ID NO: 109462 - DNA, 80 bp, synthetic construct
  source 1..80: mol_type = other DNA
aagtaaaggcatactaccttttattgtgcttcactttatcacattgcagatcctgcacttttacaaattgagggttgtag

SEQ ID NO: 109463 - DNA, 80 bp, synthetic construct
  source 1..80: mol_type = other DNA
tgttgtatttgtttgcacccattaattgtttacaggctccatgaatcccacccattcaagaaggtgaacttgattgataa

SEQ ID NO: 109464 - DNA, 80 bp, synthetic construct; identical to SEQ ID NO: 21375
  source 1..80: mol_type = other DNA

SEQ ID NO: 109465 - DNA, 80 bp, synthetic construct
  source 1..80: mol_type = other DNA
actcccttcagccaaagcctaatccagaccaaggcactaactctcttcaattctgtgaaggcttagagaagtaaggaagc

SEQ ID NO: 109466 - DNA, 80 bp, synthetic construct
  source 1..80: mol_type = other DNA
tggctacactaaacaacaaactttcaatgtggatgaaacagccttatattgaaagaagatgccatttaggatttttataa

SEQ ID NO: 109467 - DNA, 80 bp, synthetic construct; identical to SEQ ID NO: 21376
  source 1..80: mol_type = other DNA

SEQ ID NO: 109468 - DNA, 80 bp, synthetic construct
  source 1..80: mol_type = other DNA
ctaacacaaaaatcttttctgtggcccatggatcaaagagtaatttttatttctagagttattttttaagaaatacgttt

SEQ ID NO: 109469 - DNA, 80 bp, synthetic construct
  source 1..80: mol_type = other DNA
aaccctcatgatcactttaaggggttcaagacttccgtggaggaaacaactgcagatgtaatagaaataggaagagatct

SEQ ID NO: 109470 - DNA, 80 bp, synthetic construct
  source 1..80: mol_type = other DNA
aacaaaggatttagaatattttataaacttagtaaattaaaaaactggcctagttgtagaggattatctccaatattgaa

SEQ ID NO: 109471 - DNA, 80 bp, synthetic construct; identical to SEQ ID NO: 21377
  source 1..80: mol_type = other DNA

SEQ ID NO: 109472 - DNA, 80 bp, synthetic construct
  source 1..80: mol_type = other DNA
ttattgcagtgatctggacctaaatctgaagtatcttcaaggtattcctgtattattttttcctttgaagatgactttag

SEQ ID NO: 109473 - DNA, 80 bp, synthetic construct
  source 1..80: mol_type = other DNA
tgtctaaaaactagtcattttctgcaaatgtaaatcagggactgaccctcccttctacagtgaccaagatcaatggaaag

SEQ ID NO: 109474 - DNA, 80 bp, synthetic construct
  source 1..80: mol_type = other DNA
actgaccctcccttctacagtgaccaagatcaatggaaagtgaaagcatgtaatattcaaggtaaatagcagtactcagt

SEQ ID NO: 109475 - DNA, 80 bp, synthetic construct
  source 1..80: mol_type = other DNA
gtatcaaagattgcacactacgtttaagaaaccctagctcccattactcatcccttctagttgtatactccagcaaaccc

SEQ ID NO: 109476 - DNA, 80 bp, synthetic construct; identical to SEQ ID NO: 21378
  source 1..80: mol_type = other DNA

SEQ ID NO: 109477 - DNA, 80 bp, synthetic construct
  source 1..80: mol_type = other DNA
tatgaatcaggcataggagaggcatatggcacaggaaataaaagtagtgctaggatgggacagtgctgggtttgaatcct

SEQ ID NO: 109478 - DNA, 80 bp, synthetic construct
  source 1..80: mol_type = other DNA
gataacaatgataaatattcttacatataaatatggctttctacaatgtctctctgaggggaaattacttcagctctatc

SEQ ID NO: 109479 - DNA, 80 bp, synthetic construct
  source 1..80: mol_type = other DNA
gctaaactcattcataactaccattgcaataaagccatgagatgtaaataattcagaaatttatttcttcaaccaatgtt

SEQ ID NO: 109480 - DNA, 80 bp, synthetic construct
  source 1..80: mol_type = other DNA
tcctgaaagatttctgtaaggtggttatttggagcacaaatgtatttccccattttgattaaagaatgtatgagggttgg

SEQ ID NO: 109481 - DNA, 80 bp, synthetic construct; identical to SEQ ID NO: 21379
  source 1..80: mol_type = other DNA

SEQ ID NO: 109482 - DNA, 80 bp, synthetic construct
  source 1..80: mol_type = other DNA
gagttgaatactgaatgccacatgatgccttttatggaatagatgctccaaaaatgtgtactgtattagaaatgaacccc

SEQ ID NO: 109483 - DNA, 80 bp, synthetic construct
  source 1..80: mol_type = other DNA
gtagaacaccattgaatcttagccactgcaatagaatctccaggagtaggagctgagaaaggaggaatgccctcctcaga

SEQ ID NO: 109484 - DNA, 80 bp, synthetic construct; identical to SEQ ID NO: 21380
  source 1..80: mol_type = other DNA

SEQ ID NO: 109485 - DNA, 80 bp, synthetic construct
  source 1..80: mol_type = other DNA
ttcataagtacagggataattctactgtccagtttttgcttcccacatttaaactctagagaaaagaattctgcctttgt

SEQ ID NO: 109486 - DNA, 80 bp, synthetic construct
  source 1..80: mol_type = other DNA
tgtatctacctaattccttattttttccccactctctcaccagaaaaagtagacaatttatctgtgttattataaaaggc

SEQ ID NO: 109487 - DNA, 80 bp, synthetic construct
  source 1..80: mol_type = other DNA
cattgacaagtctgacttttgaggaccaaaatttatcaactttctatgaacagcataatgctttaccttacaacaggtta

SEQ ID NO: 109488 - DNA, 80 bp, synthetic construct; identical to SEQ ID NO: 21381
  source 1..80: mol_type = other DNA

SEQ ID NO: 109489 - DNA, 80 bp, synthetic construct
  source 1..80: mol_type = other DNA
tcccagttttgatctacatgaactggggaactctaagctggcaggtaacaaaagaccacttcaaaagtttttacttgttt

SEQ ID NO: 109490 - DNA, 80 bp, synthetic construct
  source 1..80: mol_type = other DNA
ttcagtttgttacacaattcacatacatcatatcaactgatctacttgaggttggttggcagctagtctcattctcactt

SEQ ID NO: 109491 - DNA, 80 bp, synthetic construct
  source 1..80: mol_type = other DNA
aggcaccattctaaacactggcaatatagtccctgctctcatgacgtttacattctagtgaggagaagttgcatttgaat

SEQ ID NO: 109492 - DNA, 80 bp, synthetic construct
  source 1..80: mol_type = other DNA
atatcatatgttctcacttataagtgagagctaagctatgaaaatgcaaaggcattagaatgatacaatggactttgagg

SEQ ID NO: 109493 - DNA, 80 bp, synthetic construct; identical to SEQ ID NO: 21382
  source 1..80: mol_type = other DNA

SEQ ID NO: 109494 - DNA, 80 bp, synthetic construct
  source 1..80: mol_type = other DNA
aggaagctcttgttatttccatatgtcagtggactagcactcacagcccaggacaaaatctcaaaccagcaacaaagtaa

SEQ ID NO: 109495 - DNA, 80 bp, synthetic construct
  source 1..80: mol_type = other DNA
taacattagttctcacttaaatttcagatattcagaactcagacctttgttattccaaggactaatgtataacaaatgga

SEQ ID NO: 109496 - DNA, 80 bp, synthetic construct; identical to SEQ ID NO: 21383
  source 1..80: mol_type = other DNA

SEQ ID NO: 109497 - DNA, 80 bp, synthetic construct
  source 1..80: mol_type = other DNA
tttgttttgtttttataccatagctaaatattataaaatgggatcaatttatttacttatttattcaattatccctccaa

SEQ ID NO: 109498 - DNA, 80 bp, synthetic construct
  source 1..80: mol_type = other DNA
gccattgtccatgttccatagattctgaaccctttgctgataatgacaactggaaattcccttggatatctactttgcaa

SEQ ID NO: 109499 - DNA, 80 bp, synthetic construct
  source 1..80: mol_type = other DNA
cacagcatgcatttctgaagatatcattgggcataaactgaaattagcaattcacatgcatctaataatctacttttctc

SEQ ID NO: 109500 - DNA, 80 bp, synthetic construct
  source 1..80: mol_type = other DNA
tactgaatttgtccccttttatcatttgacaaatgaatattgagtgcttaccgcgacagtgttggacacagaaaaacaag

SEQ ID NO: 109501 - DNA, 80 bp, synthetic construct; identical to SEQ ID NO: 21384
  source 1..80: mol_type = other DNA

SEQ ID NO: 109502 - DNA, 80 bp, synthetic construct
  source 1..80: mol_type = other DNA
cttatttaaacagctgggcacagtagttggggtaagactcagaagctaaattagaagattttgcagaaatctagggtttt

SEQ ID NO: 109503 - DNA, 80 bp, synthetic construct
  source 1..80: mol_type = other DNA
gtgttgggaggggtaatgatatgataaatcgagggtggggaaggtcaatgatttgattattagtgttctatttctagaaa

SEQ ID NO: 109504 - DNA, 80 bp, synthetic construct
  source 1..80: mol_type = other DNA
attgacaaatatgccaaacacgtaaacactcacacatatctcattgtgtgcacaagcagatgtgatttgcatatcattgt

SEQ ID NO: 109505 - DNA, 80 bp, synthetic construct; identical to SEQ ID NO: 21385
  source 1..80: mol_type = other DNA

SEQ ID NO: 109506 - DNA, 80 bp, synthetic construct
  source 1..80: mol_type = other DNA
ctttctagggctaggcaaaactcctctgaacatattggagagaaataagcagatattttagaagaaagcctgaaataatt

SEQ ID NO: 109507 - DNA, 80 bp, synthetic construct
  source 1..80: mol_type = other DNA
atggcgaaaccctctctacaaaaaaaaaaaaaaaatattagccaagtgtggttgtatagacttataacccagctactcag

SEQ ID NO: 109508 - DNA, 80 bp, synthetic construct; identical to SEQ ID NO: 21386
  source 1..80: mol_type = other DNA

SEQ ID NO: 109509 - DNA, 80 bp, synthetic construct
  source 1..80: mol_type = other DNA
agcaagataaaaatgacatttaatgaaattataaagaacaaaattaaataatttagtagaatgagaaagaccgtaaggag

SEQ ID NO: 109510 - DNA, 80 bp, synthetic construct
  source 1..80: mol_type = other DNA
acttctattgaacaagcatggtttttttccctttgtttcctatttgctttttttatgccataatttgttgtaccatagat

SEQ ID NO: 109511 - DNA, 80 bp, synthetic construct
  source 1..80: mol_type = other DNA
tattctttcagtagttactcatatatggtagaaacagaggttcactgattttcttcctgatatataaatgtgtccatgca

SEQ ID NO: 109512 - DNA, 80 bp, synthetic construct
  source 1..80: mol_type = other DNA
cttctaataagtattcaaagaaatgtatgactattaaaatagaaatgctcatctttatactatatacaatcatctttacc

SEQ ID NO: 109513 - DNA, 80 bp, synthetic construct; identical to SEQ ID NO: 21387
  source 1..80: mol_type = other DNA

SEQ ID NO: 109514 - DNA, 80 bp, synthetic construct
  source 1..80: mol_type = other DNA
aagtaaatatgcttcgtagactaaactcaatgggacttataaaagcagcattgtgctggaaggacataaactcactattg

SEQ ID NO: 109515 - DNA, 80 bp, synthetic construct
  source 1..80: mol_type = other DNA
attttcagcacatggccctctgctgtatcaaacaagcgtttggataaaggttgtagtctctccgcacatggcttgtgttt

SEQ ID NO: 109516 - DNA, 80 bp, synthetic construct
  source 1..80: mol_type = other DNA
attaaagcctctttcctttactgttaagctatttcatggcttcacagtctactatgttctagacatgtaactttattaat

SEQ ID NO: 109517 - DNA, 80 bp, synthetic construct; identical to SEQ ID NO: 21388
  source 1..80: mol_type = other DNA

SEQ ID NO: 109518 - DNA, 80 bp, synthetic construct
  source 1..80: mol_type = other DNA
gcctgagataaatgtgatacttcaaatgggcaaccttatatacatatatcatatatgaactcagacaacatgggctcaat

SEQ ID NO: 109519 - DNA, 80 bp, synthetic construct
  source 1..80: mol_type = other DNA
atcctgatcccagcacggtcttcaaaagtgttatcttcttgccaatttcactttagccttcttaaaacattttcacgaga

SEQ ID NO: 109520 - DNA, 80 bp, synthetic construct
  source 1..80: mol_type = other DNA
attgaacaataaatggtaaacctcaatctcattatgcaactttaaaaatgatatgttttttcttatatcatcagaaaaca

SEQ ID NO: 109521 - DNA, 80 bp, synthetic construct; identical to SEQ ID NO: 21389
  source 1..80: mol_type = other DNA

SEQ ID NO: 109522 - DNA, 80 bp, synthetic construct
  source 1..80: mol_type = other DNA
aaaaattagcagggcatggtggtgtgcgcctgtaatcccagctacttgagagtctgaggcaggagaatcacttgaaccca

SEQ ID NO: 109523 - DNA, 80 bp, synthetic construct
  source 1..80: mol_type = other DNA
gatcagctaagtaaacaatataatgaaatacaatatatccatgcatatatatgtggagtaaaacttatatttactgatag

SEQ ID NO: 109524 - DNA, 80 bp, synthetic construct
  source 1..80: mol_type = other DNA
actttcttacttttataactcaagcatatgttatttgtgtatttataaaaaaagaaatccatcttgccaatctcaaactg

SEQ ID NO: 109525 - DNA, 80 bp, synthetic construct
  source 1..80: mol_type = other DNA
attggttcttaaagacttcactcacgtatctcctctaaatagaatttattcctgagaatgttcccacttttgtccctagc

SEQ ID NO: 109526 - DNA, 80 bp, synthetic construct; identical to SEQ ID NO: 21390
  source 1..80: mol_type = other DNA

SEQ ID NO: 109527 - DNA, 80 bp, synthetic construct
  source 1..80: mol_type = other DNA
agtgaacggaatgatttcttgcatgcaatagctattaagagtctccaaaatatactgaagtttcacaagtgccatgtcta

SEQ ID NO: 109528 - DNA, 80 bp, synthetic construct
  source 1..80: mol_type = other DNA
cctctattgcttcctgatgcttgataacatcacttatgttgcccaggaagagctttgagttactgatgactctcattcca

SEQ ID NO: 109529 - DNA, 80 bp, synthetic construct
  source 1..80: mol_type = other DNA
tataaatgaacaattgtatctgtgacaaatgctacaaatgagacatatccatgctatgagagcctataatgtaccttcat

SEQ ID NO: 109530 - DNA, 80 bp, synthetic construct; identical to SEQ ID NO: 21391
  source 1..80: mol_type = other DNA

SEQ ID NO: 109531 - DNA, 80 bp, synthetic construct
  source 1..80: mol_type = other DNA
gaatcaactctgagaagactatttaccttagtcatttgtgagcattcttagagctgaaagaagtaatttacttaggaact

SEQ ID NO: 109532 - DNA, 80 bp, synthetic construct
  source 1..80: mol_type = other DNA
caaaaattacgctatattcacaagatatgagagggcaaaaaagaacaatgtaacagttgcccacactgtagtctgcttaa

SEQ ID NO: 109533 - DNA, 80 bp, synthetic construct
  source 1..80: mol_type = other DNA
taaattcatatttatgatgtcctattatgtataagacagtgctggtactttcatatatatagtatatgaactgtcattgt

SEQ ID NO: 109534 - DNA, 80 bp, synthetic construct; identical to SEQ ID NO: 21392
  source 1..80: mol_type = other DNA

SEQ ID NO: 109535 - DNA, 80 bp, synthetic construct
  source 1..80: mol_type = other DNA
acgatgttcaagattagtgttctacaaaacaaagagtctctataaagacagtggtgatctgccattttcaagttcgaaaa

SEQ ID NO: 109536 - DNA, 80 bp, synthetic construct
  source 1..80: mol_type = other DNA
acctaatgctaaatgatgagttaatgggtgcagcacaccaacatggcacatgtatacatatgtaacaaacctgcacgttg

SEQ ID NO: 109537 - DNA, 80 bp, synthetic construct; identical to SEQ ID NO: 21393
  source 1..80: mol_type = other DNA

SEQ ID NO: 109538 - DNA, 80 bp, synthetic construct
  source 1..80: mol_type = other DNA
ctcacagtttaagcatattcctgcctagggacagtagacagactagaagtagtctccaggcacataattttttaacatga

SEQ ID NO: 109539 - DNA, 80 bp, synthetic construct
  source 1..80: mol_type = other DNA
caaggaaaagtagtacatttggttaatgacctaaaataagtacaaaggacgactgcatcatccttcacttaccaaagcat

SEQ ID NO: 109540 - DNA, 80 bp, synthetic construct
  source 1..80: mol_type = other DNA
aaaataaacgtaatgatttggtatcagtttaatgaataaatacatttcagcatatatttgcacgttttatgtttcctaat

SEQ ID NO: 109541 - DNA, 80 bp, synthetic construct; identical to SEQ ID NO: 21394
  source 1..80: mol_type = other DNA

SEQ ID NO: 109542 - DNA, 80 bp, synthetic construct
  source 1..80: mol_type = other DNA
gattgaaactatttgatgccacataacaatgaatatgagttggatggcacacaaataaccagtattgtgaactttccttc

SEQ ID NO: 109543 - DNA, 80 bp, synthetic construct
  source 1..80: mol_type = other DNA
ctagagactggaagctaaagcagagttattttctagtcaccctttaagatgctctaggatattgctactcaaactgtgct

SEQ ID NO: 109544 - DNA, 80 bp, synthetic construct
  source 1..80: mol_type = other DNA
atcacttcctgctttaaactccccaccatatgattaacataagaatgttaccgtgggaaagtgcttcattaaaaaaaaaa

SEQ ID NO: 109545 - DNA, 80 bp, synthetic construct
  source 1..80: mol_type = other DNA
tacactattatatataaaaatacaattttagaaaattatttttaattacacttattgaagatatttatatcaatattata

SEQ ID NO: 109546 - DNA, 80 bp, synthetic construct; identical to SEQ ID NO: 21395
  source 1..80: mol_type = other DNA

SEQ ID NO: 109547 - DNA, 80 bp, synthetic construct
  source 1..80: mol_type = other DNA
aacaatagcaaaaacaaataataaacaaatagtgtgattaaaaacctggcaaatgaactgaatagacatcgctcaaaaga

SEQ ID NO: 109548 - DNA, 80 bp, synthetic construct
  source 1..80: mol_type = other DNA
aactctcacacactgttggtgggaatgtaaattagtgcagccattatgaaaaatagtatggggcttcctcaaaaaactga

SEQ ID NO: 109549 - DNA, 80 bp, synthetic construct
  source 1..80: mol_type = other DNA
tgaagaaagcaaatgtggtgtatgcgtctgtgtgtgtatatatgaataatggaatgtgtgtgtgtatgtgtgtgtgtgta

SEQ ID NO: 109550 - DNA, 80 bp, synthetic construct
  source 1..80: mol_type = other DNA
aatattatttgttctcactcatatgtggaagctataaaagttgatctcatagacgtagagagtagaatagtggttactag

SEQ ID NO: 109551 - DNA, 80 bp, synthetic construct; identical to SEQ ID NO: 21396
  source 1..80: mol_type = other DNA

SEQ ID NO: 109552 - DNA, 80 bp, synthetic construct
  source 1..80: mol_type = other DNA
ctaggaatttgagaccagccttggcaacacagtaagatcctgtctctacaaaaaaaattagctgggtgtcgtggcatgtg

SEQ ID NO: 109553 - DNA, 80 bp, synthetic construct
  source 1..80: mol_type = other DNA
taaagcaggtttgcaaaaaaaaaaaaatcaaatgttttcttttagtgcttcatgcagtgtctgatatgttgtaggaactc

SEQ ID NO: 109554 - DNA, 80 bp, synthetic construct; identical to SEQ ID NO: 21397
  source 1..80: mol_type = other DNA

SEQ ID NO: 109555 - DNA, 80 bp, synthetic construct
  source 1..80: mol_type = other DNA
agtagtcttatttggaagatgtttaagcacaaagattgtttcagaagtttaaaatctgcatgattttatgcaaggattag

SEQ ID NO: 109556 - DNA, 80 bp, synthetic construct
  source 1..80: mol_type = other DNA
tgattttttttaaccacagcagtgtcagctttctattaataggctcttatccagctgaaaatgtacatagcttcctgatg

SEQ ID NO: 109557 - DNA, 80 bp, synthetic construct
  source 1..80: mol_type = other DNA
attatagaacaagtcacagtttgtatttcagaaatgcctgttgagttgaatggaagcaggttcaatgtagcaatattaag

SEQ ID NO: 109558 - DNA, 80 bp, synthetic construct; identical to SEQ ID NO: 21398
  source 1..80: mol_type = other DNA

SEQ ID NO: 109559 - DNA, 80 bp, synthetic construct
  source 1..80: mol_type = other DNA
cccaggctggagtgaagtggtgcgatgttggttcactgcaacctctgtctcccgggtcctagtgattctcctgcctcagc

SEQ ID NO: 109560 - DNA, 80 bp, synthetic construct
  source 1..80: mol_type = other DNA
gagccactgcactgggcccaggaaaaataaatttgccattctcctatgctaattttatatgagccctctaaaaatttgtc

SEQ ID NO: 109561 - DNA, 80 bp, synthetic construct
  source 1..80: mol_type = other DNA
tcagggctacattcctttctggggcctctagagagaatccatctccttgtactttctaccttctacaggttgccacataa

SEQ ID NO: 109562 - DNA, 80 bp, synthetic construct; identical to SEQ ID NO: 21399
  source 1..80: mol_type = other DNA

SEQ ID NO: 109563 - DNA, 80 bp, synthetic construct
  source 1..80: mol_type = other DNA
tcaaaatccatggctcacaaccgtgtatcttttgggcattctaatttaaaaaatgcccattcacatttgcaaaattgtca

SEQ ID NO: 109564 - DNA, 80 bp, synthetic construct
  source 1..80: mol_type = other DNA
caatgatgaaactgaagaagtataacaattataaaattgcctagcgtcatgttgaatttggctgaaacaactgtacacta

SEQ ID NO: 109565 - DNA, 80 bp, synthetic construct
  source 1..80: mol_type = other DNA
taatcatttattttgcccagaaatttgtaatttggttagagttcagcaggtatggcctgcctctgctccacagttgtcac

SEQ ID NO: 109566 - DNA, 80 bp, synthetic construct; identical to SEQ ID NO: 21400
  source 1..80: mol_type = other DNA

SEQ ID NO: 109567 - DNA, 80 bp, synthetic construct
  source 1..80: mol_type = other DNA
ctctcaagagaagaagagtcaagatcacagtataagaagaacacatgagatgggaaatcttgctgcagccacttttgaaa

SEQ ID NO: 109568 - DNA, 80 bp, synthetic construct
  source 1..80: mol_type = other DNA
caagaaatgaggactccaaagtttagagactgtgcatacagataaaaaaacagaaccctgcaggtccagagaaatagctg

SEQ ID NO: 109569 - DNA, 80 bp, synthetic construct
  source 1..80: mol_type = other DNA
aatagtttctctctttgatttcttttcctccatctccattcttcagatttccattgcccatgaaaagaatcttcttgtgc

SEQ ID NO: 109570 - DNA, 80 bp, synthetic construct
  source 1..80: mol_type = other DNA
ttcaacgtgtgtcagaatgatctaaaaggtttgttagaacacagatcactaggccatactctcctcttacagtttatgat

SEQ ID NO: 109571 - DNA, 80 bp, synthetic construct
  source 1..80: mol_type = other DNA
tcggaattttctcaaagttgttatgtccatatagctcacatgcattcatacattttgacccaaatcaaaaaacaggaaag

SEQ ID NO: 109572 - DNA, 80 bp, synthetic construct; identical to SEQ ID NO: 21401
  source 1..80: mol_type = other DNA

SEQ ID NO: 109573 - DNA, 80 bp, synthetic construct
  source 1..80: mol_type = other DNA
aattaaagatgatgtccattggataaaagtgtaccaaggatcctagaaggaggagcctcaacaagcaaaaactcagttgc

SEQ ID NO: 109574 - DNA, 80 bp, synthetic construct
  source 1..80: mol_type = other DNA
tcaatattagttgaatgcctcactctacatgtcaatttttacattgctgcccatacagtctcaaaaaggggttgctatac

SEQ ID NO: 109575 - DNA, 80 bp, synthetic construct; identical to SEQ ID NO: 21402
  source 1..80: mol_type = other DNA

SEQ ID NO: 109576 - DNA, 80 bp, synthetic construct
  source 1..80: mol_type = other DNA
ctattggataaacagtgacttttatgcaatgaaacactgtacagaaagaaaaataacaaactctagctacatacaacaac

SEQ ID NO: 109577 - DNA, 80 bp, synthetic construct
  source 1..80: mol_type = other DNA
caaaaaagctggttccctggagaggaaagttcaaagaaagaggagccttaattgggaagcgacaccaaagtgagagtcaa

SEQ ID NO: 109578 - DNA, 80 bp, synthetic construct; identical to SEQ ID NO: 21403
  source 1..80: mol_type = other DNA

SEQ ID NO: 109579 - DNA, 80 bp, synthetic construct
  source 1..80: mol_type = other DNA
ttttcctttccctagcttacttcattgtaattatctctctctctctatatatatatacagacacacacacacacacacac

SEQ ID NO: 109580 - DNA, 80 bp, synthetic construct
  source 1..80: mol_type = other DNA
atatgtgaattttcgactggtaagtcggtgtccttacccttgtgttgttcaagagtcaaccgcatatgtgagttatgaaa

SEQ ID NO: 109581 - DNA, 80 bp, synthetic construct
  source 1..80: mol_type = other DNA
gcgggacagcattattcagtaatcaccacagtgtcctaattctttttacacttgtatatagagttcttgcgcattttggc

SEQ ID NO: 109582 - DNA, 80 bp, synthetic construct; identical to SEQ ID NO: 21404
  source 1..80: mol_type = other DNA

SEQ ID NO: 109583 - DNA, 80 bp, synthetic construct
  source 1..80: mol_type = other DNA
ttctcaagagggaagtatgtcattccatttagtttgtgaatctttttgccctgtatttccctgaggttattgtctttttt

SEQ ID NO: 109584 - DNA, 80 bp, synthetic construct
  source 1..80: mol_type = other DNA
gttgaggatttcaatcccatctcctttgaagctaccactagcatctatactcatctttatgttcttgttaactgtggtgt

SEQ ID NO: 109585 - DNA, 80 bp, synthetic construct
  source 1..80: mol_type = other DNA
tccaccctgaatgccaataaagtgtgtctccttcagcttggttcactgaacccaagatcaccatatttattaatttagtt

SEQ ID NO: 109586 - DNA, 80 bp, synthetic construct; identical to SEQ ID NO: 21405
  source 1..80: mol_type = other DNA

SEQ ID NO: 109587 - DNA, 80 bp, synthetic construct
  source 1..80: mol_type = other DNA
tctttcaagaaactttgaactggcagcccagtgtcagagagttacatatacaattatctcatcatttcttgaggactaga

SEQ ID NO: 109588 - DNA, 80 bp, synthetic construct
  source 1..80: mol_type = other DNA
ttcattcctctccatccacaggtaaatgacagagtgataggaagaagataaaatactatgtctcaaagcacctgggtatt

SEQ ID NO: 109589 - DNA, 80 bp, synthetic construct
  source 1..80: mol_type = other DNA
actgtcagaactattatttctaatataactctcagtcactatgaacaaaggccctagagaattctgctgacttattgcct

SEQ ID NO: 109590 - DNA, 80 bp, synthetic construct
  source 1..80: mol_type = other DNA
ctcatagtatttagaacaactctgccaacagatttggttttactgtagcaactgattcttctttgtaagccagaagaaac

SEQ ID NO: 109591 - DNA, 80 bp, synthetic construct; identical to SEQ ID NO: 21406
  source 1..80: mol_type = other DNA

SEQ ID NO: 109592 - DNA, 80 bp, synthetic construct
  source 1..80: mol_type = other DNA
ccagggctacatcccacagactactaattctcacctacttcctgtctcttttttttttttttgtcatttctgcattgatc

SEQ ID NO: 109593 - DNA, 80 bp, synthetic construct
  source 1..80: mol_type = other DNA
aataatatgacattctttacatcaaacaccataaggcacaccttggagataccatgcaataaagcaaataattgcaagaa

SEQ ID NO: 109594 - DNA, 80 bp, synthetic construct; identical to SEQ ID NO: 21407
  source 1..80: mol_type = other DNA

SEQ ID NO: 109595 - DNA, 80 bp, synthetic construct
  source 1..80: mol_type = other DNA
caacaagattgaaaataaaaaatactttattgctaaaaaatactaacaatcatgtgagccttcagtgagtcataatcttt

SEQ ID NO: 109596 - DNA, 80 bp, synthetic construct
  source 1..80: mol_type = other DNA
tgtgacattcactgtttgataggattttacccataggagaatttcttttgaaatcagagttaatcctcttaaacccagcc

SEQ ID NO: 109597 - DNA, 80 bp, synthetic construct
  source 1..80: mol_type = other DNA
attcatagaaagcacctcctaggccaggcatggtggctcatgcctgtaatcccagcacgttgggaggccaaggtgggtgg

SEQ ID NO: 109598 - DNA, 80 bp, synthetic construct; identical to SEQ ID NO: 21408
  source 1..80: mol_type = other DNA

SEQ ID NO: 109599 - DNA, 80 bp, synthetic construct
  source 1..80: mol_type = other DNA
cctcaaagtcatcatgagggttggaatcaactttttacataatggtgatattttgacctcctgccatgaatcaaaaatat

SEQ ID NO: 109600 - DNA, 80 bp, synthetic construct
  source 1..80: mol_type = other DNA
gagaaagttgtcaatatagtttgcttggatccataagaggtatttctccctatgtcacctatagccttataaaatgtttt

SEQ ID NO: 109601 - DNA, 80 bp, synthetic construct
  source 1..80: mol_type = other DNA
actgggattacaggtgcctgccaccacgcccagctgattttttgtatttttagtacaggcagggtttcaccacattggcc

SEQ ID NO: 109602 - DNA, 80 bp, synthetic construct
  source 1..80: mol_type = other DNA
atcttctgttaggcacgaaaacaacattaatctttttgtatatcaccatcagagctcttgggtgaccaggtgcattgtca

SEQ ID NO: 109603 - DNA, 80 bp, synthetic construct; identical to SEQ ID NO: 21409
  source 1..80: mol_type = other DNA

SEQ ID NO: 109604 - DNA, 80 bp, synthetic construct
  source 1..80: mol_type = other DNA
tagcgtagccaccttcatcaatgatcttagctagatcttctggataacttgctgcagcttctacatcaatccttgctgct

SEQ ID NO: 109605 - DNA, 80 bp, synthetic construct
  source 1..80: mol_type = other DNA
aaagagaattctggctggttggatcttctatccagaccactaaaactttctccacatcagcaataagtttgtttcacttt

SEQ ID NO: 109606 - DNA, 80 bp, synthetic construct
  source 1..80: mol_type = other DNA
aagtaaagatatgcaactcttcctttcacttgaattcttagaggctgttgtaggttattaattttcctaatctcaatatt

SEQ ID NO: 109607 - DNA, 80 bp, synthetic construct; identical to SEQ ID NO: 21410
  source 1..80: mol_type = other DNA

SEQ ID NO: 109608 - DNA, 80 bp, synthetic construct
  source 1..80: mol_type = other DNA
ccagtctttattctcactgttattttttgctcttttctttttgttttgcaatgtagcagggaccttttatcattcatttt

SEQ ID NO: 109609 - DNA, 80 bp, synthetic construct
  source 1..80: mol_type = other DNA
catagaatctaaaattttgttatatttcagatggaggtaacttgcctttttctaaatgcaatgcctaatatttctgcaga

SEQ ID NO: 109610 - DNA, 80 bp, synthetic construct
  source 1..80: mol_type = other DNA
gctccagcagtgaatgtcagagaagtgccacttcatatctcttatttttgtcttgacattatattaaatgtcttcctcaa

SEQ ID NO: 109611 - DNA, 80 bp, synthetic construct; identical to SEQ ID NO: 21411
  source 1..80: mol_type = other DNA

SEQ ID NO: 109612 - DNA, 80 bp, synthetic construct
  source 1..80: mol_type = other DNA
cttataggtcaaaatatcatgtctttaacttgtttgggtgaaaaccacatgccctagcttctggcacagataacaaatta

SEQ ID NO: 109613 - DNA, 80 bp, synthetic construct
  source 1..80: mol_type = other DNA
atgtggagatgtttgatgtttagagagcattaacttgtatagagcagagcaagactttattcattgcacatttgccaagg

SEQ ID NO: 109614 - DNA, 80 bp, synthetic construct; identical to SEQ ID NO: 21412
  source 1..80: mol_type = other DNA

SEQ ID NO: 109615 - DNA, 80 bp, synthetic construct
  source 1..80: mol_type = other DNA
acatgtccccaacgggtttctttttgtttgaaagaagaaaagaataatgttttaatactatctttaagctccaactaagc

SEQ ID NO: 109616 - DNA, 80 bp, synthetic construct
  source 1..80: mol_type = other DNA
gccaacagtattggaggccttaagtctctatggattcctaagcctttagtataataactgaatagcctcaattcattttt

SEQ ID NO: 109617 - DNA, 80 bp, synthetic construct
  source 1..80: mol_type = other DNA
ataaaaactacaagaaaaagcttcttaacggaacctaacaagggctgacactacacagctatattttctgctcattgtca

SEQ ID NO: 109618 - DNA, 80 bp, synthetic construct; identical to SEQ ID NO: 21413
  source 1..80: mol_type = other DNA

SEQ ID NO: 109619 - DNA, 80 bp, synthetic construct
  source 1..80: mol_type = other DNA
ctaaagtgaacttgagcagtaaagaataacaagaagtttcagagtcagactaatcaggtttatgtgatacctgcctttca

SEQ ID NO: 109620 - DNA, 80 bp, synthetic construct
  source 1..80: mol_type = other DNA
gacttcttaggctttcaaattgttctcaggttttcccatgacctatctcaaaaacaaactatttctaattaatgtctcta

SEQ ID NO: 109621 - DNA, 80 bp, synthetic construct
  source 1..80: mol_type = other DNA
actgttcaatttagagagtaatttgcacttacgaataaatttggtgaccagagaattcactgacccatatatgttatgaa

SEQ ID NO: 109622 - DNA, 80 bp, synthetic construct; identical to SEQ ID NO: 21414
  source 1..80: mol_type = other DNA

SEQ ID NO: 109623 - DNA, 80 bp, synthetic construct
  source 1..80: mol_type = other DNA
ttgtttgaatcatgatccaaccattccatacattgtgatgggttgctaactttttacatttcttttcatctgttctccag

SEQ ID NO: 109624 - DNA, 80 bp, synthetic construct
  source 1..80: mol_type = other DNA
tactatggtgtagattttggcatattcctcatccctctatttcttaaaaattggaggctgtgtatttccttttccttccc

SEQ ID NO: 109625 - DNA, 80 bp, synthetic construct
  source 1..80: mol_type = other DNA
cagacttttatccatgggtctgtgcattgccctcaagtgctacataatgaaaaaatccagtcttctacttaaacaaacca

SEQ ID NO: 109626 - DNA, 80 bp, synthetic construct
  source 1..80: mol_type = other DNA
tgcacaaatcttttcatttaactgtgcctttcaccatcgtggtactcctcttttgaataggctagctttctaatgtcagt

SEQ ID NO: 109627 - DNA, 80 bp, synthetic construct
  source 1..80: mol_type = other DNA
tttgatgaggtaaatgcagaaacataggttggatcgcctcataatttcaccatctgtcatgctagatgatataacttgtt

SEQ ID NO: 109628 - DNA, 80 bp, synthetic construct; identical to SEQ ID NO: 21415
  source 1..80: mol_type = other DNA

SEQ ID NO: 109629 - DNA, 80 bp, synthetic construct
  source 1..80: mol_type = other DNA
tatatgggattcccagcaacttggatacattacattgcaaggaagataaaggactgtttatagccctaaacctgtgtgct

SEQ ID NO: 109630 - DNA, 80 bp, synthetic construct
  source 1..80: mol_type = other DNA
gctatatcacatacagttgtgtgaattctagcacattctttaaactctctcaacttcagcttcctattctctaaacagca

SEQ ID NO: 109631 - DNA, 80 bp, synthetic construct
  source 1..80: mol_type = other DNA
ttaccctaaaatcctttggagttcaactttgtcctatttctaatttatctattactctgtacctgaaacacaattctgta

SEQ ID NO: 109632 - DNA, 80 bp, synthetic construct; identical to SEQ ID NO: 21416
  source 1..80: mol_type = other DNA

SEQ ID NO: 109633 - DNA, 80 bp, synthetic construct
  source 1..80: mol_type = other DNA
tactgatagagtgcttacatttcagtaatgtgtccaaaagtgattgcaagccccaggcgtgatggttcttgcctgtattc

SEQ ID NO: 109634 - DNA, 80 bp, synthetic construct
  source 1..80: mol_type = other DNA
gctgaggtagaaagattgctggaacccaggagtttgagactgcagtgagctatgatcatgccactgcattccaatatggg

SEQ ID NO: 109635 - DNA, 80 bp, synthetic construct
  source 1..80: mol_type = other DNA
ctgtacaaaggtataccttttataaaagactggaggaagacaattgtagctagggcacaaaaggtgagaattgcaaagat

SEQ ID NO: 109636 - DNA, 80 bp, synthetic construct; identical to SEQ ID NO: 21417
  source 1..80: mol_type = other DNA

SEQ ID NO: 109637 - DNA, 80 bp, synthetic construct
  source 1..80: mol_type = other DNA
atgggtaactccagaaggtcttccaaggcccttttaaacccccgcagagcaaaggcagaaacaaaagctctatttcataa

SEQ ID NO: 109638 - DNA, 80 bp, synthetic construct
  source 1..80: mol_type = other DNA
ctgaacagaggtagagaaacagaagattaagacgctcgtagctatcttaataacttgtgcagagctaaacaagaagtttt

SEQ ID NO: 109639 - DNA, 80 bp, synthetic construct; identical to SEQ ID NO: 21418
  source 1..80: mol_type = other DNA

SEQ ID NO: 109640 - DNA, 80 bp, synthetic construct
  source 1..80: mol_type = other DNA
ctctcagtaattgttattaatacgaggtgtcagactgaatttctcagtgcaaggtacaaataaggcacttcttataaata

SEQ ID NO: 109641 - DNA, 80 bp, synthetic construct
  source 1..80: mol_type = other DNA
cagctgtcagaagcaaattttagatccacctccaaaagttttacctcaactagaaccagactgtgtctgtattcaaagta

SEQ ID NO: 109642 - DNA, 80 bp, synthetic construct
  source 1..80: mol_type = other DNA
acataaagatagaatttaccatttagaggaaaatgaagaatgaatttacaaaaagaaccagaattctaacacttaattgc

SEQ ID NO: 109643 - DNA, 80 bp, synthetic construct
  source 1..80: mol_type = other DNA
gtaggaaaggaaaaacaaatttaaggtctccatttaaaaatatcataaagcagaaatgcttcaaattactttttaagttt

SEQ ID NO: 109644 - DNA, 80 bp, synthetic construct; identical to SEQ ID NO: 21419
  source 1..80: mol_type = other DNA

SEQ ID NO: 109645 - DNA, 80 bp, synthetic construct
  source 1..80: mol_type = other DNA
aaatggtagcaataccttcagcagtgatctcagtcatggtggtcgtcaaaagtaaaagtcagttgaaaagttcccgtcaa

SEQ ID NO: 109646 - DNA, 80 bp, synthetic construct
  source 1..80: mol_type = other DNA
agccctttccaagcagcacttgtggctcagctagaagtatcagcttcaaacaaaaatagcctcatctccctaggactctt

SEQ ID NO: 109647 - DNA, 80 bp, synthetic construct
  source 1..80: mol_type = other DNA
gtagtgcaaaacaataaatttttatttgttcacagttaaacacaagcaactgccttgacattttagaacattctaagaag

SEQ ID NO: 109648 - DNA, 80 bp, synthetic construct
  source 1..80: mol_type = other DNA
ctaaaagcagtccgttaaaaaaaatcagtttctttcactgatgggacccctttaaactgcaagtttgccacacatggttc

SEQ ID NO: 109649 - DNA, 80 bp, synthetic construct; identical to SEQ ID NO: 21420
  source 1..80: mol_type = other DNA

SEQ ID NO: 109650 - DNA, 80 bp, synthetic construct
  source 1..80: mol_type = other DNA
aagtggggaggaagctcctctgccatcattaactcgtttcatgaccagaagccatgggcacaggtgctcggctcttccag

SEQ ID NO: 109651 - DNA, 80 bp, synthetic construct
  source 1..80: mol_type = other DNA
ggccagtcctcgacctaaacttgttctttcacctacagacaaaagcttaatcaagtgcaatcaatgccttgggatctttg

SEQ ID NO: 109652 - DNA, 80 bp, synthetic construct
  source 1..80: mol_type = other DNA
aatacttgttgcgggtcggttttaaagcatgtaccctggagagtgaaggtgcagcagataggtatactgatttgagtcac

SEQ ID NO: 109653 - DNA, 80 bp, synthetic construct
  source 1..80: mol_type = other DNA
cacctcttagtgctttcagcgagaaaaggtgagtctcattacgcagaacttttgtttgctcttcggttctttccttcttc

SEQ ID NO: 109654 - DNA, 80 bp, synthetic construct; identical to SEQ ID NO: 21421
  source 1..80: mol_type = other DNA

SEQ ID NO: 109655 - DNA, 80 bp, synthetic construct
  source 1..80: mol_type = other DNA
taattgtcctgggtcgtaacagttcaccttctcagaacagtttggactgtttccccaaccatgtcacataagctttggct

SEQ ID NO: 109656 - DNA, 80 bp, synthetic construct
  source 1..80: mol_type = other DNA
aactcatctccaaggacatctttcacaacttctccatctaagaaatgaccttgaccttcctacctttgggtttgtttttt

SEQ ID NO: 109657 - DNA, 80 bp, synthetic construct; identical to SEQ ID NO: 21422
  source 1..80: mol_type = other DNA

SEQ ID NO: 109658 - DNA, 80 bp, synthetic construct
  source 1..80: mol_type = other DNA
agacaggtatgctcacccatagtgatttctggatggaggccatccaatcccaatatttatgaataccaagctgcttaatt

SEQ ID NO: 109659 - DNA, 80 bp, synthetic construct
  source 1..80: mol_type = other DNA
aaaaccaaaccaaacctaactactgactctggagttctttgcaacatgaaagcctacatttttaggttgggcaccttcaa

SEQ ID NO: 109660 - DNA, 80 bp, synthetic construct
  source 1..80: mol_type = other DNA
ggagcttctagcacaggcctctctccatgctgcctcctttcttccctttatttttataagctgtccgtttctaaaatgtt

SEQ ID NO: 109661 - DNA, 80 bp, synthetic construct; identical to SEQ ID NO: 21423
  source 1..80: mol_type = other DNA

SEQ ID NO: 109662 - DNA, 80 bp, synthetic construct
  source 1..80: mol_type = other DNA
ggtgacagagtctctaactgtctagtcccctttagttagggatgctagaatatttattgccatgctaaaaaaaaaaaaaa

SEQ ID NO: 109663 - DNA, 80 bp, synthetic construct
  source 1..80: mol_type = other DNA
atgactgaatccttctattctttttaatgaaagatagaaacaggaaagccaagttcactggctccttcctaccaaatccc

SEQ ID NO: 109664 - DNA, 80 bp, synthetic construct
  source 1..80: mol_type = other DNA
gccagcattctcccggactctgtttagactgctctgccattactaacatggagagtgtgatgacatcagctccctggaga

SEQ ID NO: 109665 - DNA, 80 bp, synthetic construct
  source 1..80: mol_type = other DNA
aactctttggaccttcagagcctttctgctgcagtgtcacatataagctgacatgaacaagaggcgtatgcacacaaagg

SEQ ID NO: 109666 - DNA, 80 bp, synthetic construct; identical to SEQ ID NO: 21424
  source 1..80: mol_type = other DNA

SEQ ID NO: 109667 - DNA, 80 bp, synthetic construct
  source 1..80: mol_type = other DNA
aaaagcagtcggaaagtctcatgtaaacgctttcatgtaaagacaaccagctttgcaggctatgtcctcctggaagggac

SEQ ID NO: 109668 - DNA, 80 bp, synthetic construct
  source 1..80: mol_type = other DNA
aggaagaaagtaaagctactgaggaacaccaactggcccttggattagaacacactgcgaggtaaatgagagggggttag

SEQ ID NO: 109669 - DNA, 80 bp, synthetic construct; identical to SEQ ID NO: 21425
  source 1..80: mol_type = other DNA

SEQ ID NO: 109670 - DNA, 80 bp, synthetic construct
  source 1..80: mol_type = other DNA
tcgctcttattacgaaataactctcgagccttcatacccaggaagctttttgaactgggaagtgagcccacagtggtggg

SEQ ID NO: 109671 - DNA, 80 bp, synthetic construct
  source 1..80: mol_type = other DNA
ggggtcttggtctcaccgttgtggccagatgcctcttcattgtgccctaccatggaatctgagcacccgtcattacaaca

SEQ ID NO: 109672 - DNA, 80 bp, synthetic construct
  source 1..80: mol_type = other DNA
agaaacctaaatcacaactagggatagtaggtggcaatcttaagtgtgaacacttcctgtggccatatggagggactcaa

SEQ ID NO: 109673 - DNA, 80 bp, synthetic construct; identical to SEQ ID NO: 21426
  source 1..80: mol_type = other DNA

SEQ ID NO: 109674 - DNA, 80 bp, synthetic construct
  source 1..80: mol_type = other DNA
gaaagatacagaccagccagaatataggaagttccacttaataaaaacacaaaagcctttcctgatgaaagttaccttgc

SEQ ID NO: 109675 - DNA, 80 bp, synthetic construct
  source 1..80: mol_type = other DNA
gagaacatggcttctgtttttttctagctctttccgataggcggctttcatcatttctacttcctgaaaaaaaaaaaaaa

SEQ ID NO: 109676 - DNA, 80 bp, synthetic construct
  source 1..80: mol_type = other DNA
ttccttgaaatctatccccaagcaaatcatgtgaaacataaatagagattttgcacaaaaataatcatcacagcatattt

SEQ ID NO: 109677 - DNA, 80 bp, synthetic construct; identical to SEQ ID NO: 21427
  source 1..80: mol_type = other DNA

SEQ ID NO: 109678 - DNA, 80 bp, synthetic construct
  source 1..80: mol_type = other DNA
tgctgccgacagattggaacagcttgaaacccagagcaagtacacactaatgctcagaaagaaggcggaaagggtatttt

SEQ ID NO: 109679 - DNA, 80 bp, synthetic construct
  source 1..80: mol_type = other DNA
ccaatgcttccttgttatagaacgcaactgattgaaactcagaactggctctcggataatgcggctgttccagctgtgct

SEQ ID NO: 109680 - DNA, 80 bp, synthetic construct
  source 1..80: mol_type = other DNA
attccccaccactcactcttcctcctcctttggatggaacaagagcaaccctagctccaggttcaggagcaaatcctgac

SEQ ID NO: 109681 - DNA, 80 bp, synthetic construct
  source 1..80: mol_type = other DNA
gtgatctcggcccactgaaacctccgcctccggggttcaagcgattcccctgcctcagctccccaagtagctgggactac

SEQ ID NO: 109682 - DNA, 80 bp, synthetic construct; identical to SEQ ID NO: 21428
  source 1..80: mol_type = other DNA

SEQ ID NO: 109683 - DNA, 80 bp, synthetic construct
  source 1..80: mol_type = other DNA
tcttgtcaagtgaaacaatacagttcttcactgttaagccagttgagtgctttttgtttttgttgtttttttggatattg

SEQ ID NO: 109684 - DNA, 80 bp, synthetic construct
  source 1..80: mol_type = other DNA
ttttatgaactgggaaacagggccccatggagaggcagctactcaaggtcccaaacagcacaaggactccttggaggccg

SEQ ID NO: 109685 - DNA, 80 bp, synthetic construct
  source 1..80: mol_type = other DNA
tccttctaaaaaagggagtctgaatctgagagctgagaggagccaagaaataaagagtaactctattaggaaaattactc

SEQ ID NO: 109686 - DNA, 80 bp, synthetic construct; identical to SEQ ID NO: 21429
  source 1..80: mol_type = other DNA

SEQ ID NO: 109687 - DNA, 80 bp, synthetic construct
  source 1..80: mol_type = other DNA
tttgaaaggcagcctagggaagagaaaggaaacactttacacctactctctaccaactaccattaggtgctttcagtgtg

SEQ ID NO: 109688 - DNA, 80 bp, synthetic construct
  source 1..80: mol_type = other DNA
ctgaaacgctttccccactaaggtctggctcccgagccctggcatacctttgtggtatctgagtgcttgttctgcagttg

SEQ ID NO: 109689 - DNA, 80 bp, synthetic construct; identical to SEQ ID NO: 21430
  source 1..80: mol_type = other DNA

SEQ ID NO: 109690 - DNA, 80 bp, synthetic construct
  source 1..80: mol_type = other DNA
aaagccctagggaaaactcaccgttcttgacaaaatgatgtatgaagtgcagtgattcccaaagaaggaggaatcacgct

SEQ ID NO: 109691 - DNA, 80 bp, synthetic construct
  source 1..80: mol_type = other DNA
attgtaggatatttggcagcaccctggctcctacccactggataccagcagcaccaaaaacatgaacctaaaatgtctcc

SEQ ID NO: 109692 - DNA, 80 bp, synthetic construct
  source 1..80: mol_type = other DNA
tggtgtttcagcagattcaggtctgcctcatttcttcttaccttttgggaaacctgactgagcagcagctcagtgtgaca

SEQ ID NO: 109693 - DNA, 80 bp, synthetic construct; identical to SEQ ID NO: 21431
  source 1..80: mol_type = other DNA

SEQ ID NO: 109694 - DNA, 80 bp, synthetic construct
  source 1..80: mol_type = other DNA
actctgtgaattactaactggctggaaatgatgctgtgtctgtggatgacgtctttgtgaagccgggtttttttgggtgc

SEQ ID NO: 109695 - DNA, 80 bp, synthetic construct
  source 1..80: mol_type = other DNA
tatctgtgaacagctactaagttcttaggacattcgtactcactaagttattcagatctacttaatgagcagaactgtta

SEQ ID NO: 109696 - DNA, 80 bp, synthetic construct
  source 1..80: mol_type = other DNA
gccatgatttcagagagaaaagcattcagcttagtaaagctgaacaagtcaaggacacccagggaaactgactgcctccc

SEQ ID NO: 109697 - DNA, 80 bp, synthetic construct; identical to SEQ ID NO: 21432
  source 1..80: mol_type = other DNA

SEQ ID NO: 109698 - DNA, 80 bp, synthetic construct
  source 1..80: mol_type = other DNA
ccaaaactcttagagctcactactgtcttacttggccttaggtcaaggttttccaaattttacattaagcaaatggatct

SEQ ID NO: 109699 - DNA, 80 bp, synthetic construct
  source 1..80: mol_type = other DNA
gcttaccgacataatttcttttaaccatcacaacttaaagagcaggtgctgctattgttatttccattttatagcatggc

SEQ ID NO: 109700 - DNA, 80 bp, synthetic construct
  source 1..80: mol_type = other DNA
ataaaatcatcttctgacccttcatcatcatggccagttacatgcaaacatacacacacaaaatcacttgtccccacggt

SEQ ID NO: 109701 - DNA, 80 bp, synthetic construct
  source 1..80: mol_type = other DNA
ctatcatgctgacccaaaacaaaacaaaaagcaagctccacctgtcccctccccagtcctcaccatggcagcattatgtt

SEQ ID NO: 109702 - DNA, 80 bp, synthetic construct; identical to SEQ ID NO: 21433
  source 1..80: mol_type = other DNA

SEQ ID NO: 109703 - DNA, 80 bp, synthetic construct
  source 1..80: mol_type = other DNA
caaatctagatcacgcatttcagatgccctgtttctcaagacacttccttcgctgtgtgttctcccccaggaagatgctt

SEQ ID NO: 109704 - DNA, 80 bp, synthetic construct
  source 1..80: mol_type = other DNA
ggggagatctgtttcccagagggcacctccttcaaggacagaaagggcaacaagcaagcaggaaccatgtgggctggatt

SEQ ID NO: 109705 - DNA, 80 bp, synthetic construct
  source 1..80: mol_type = other DNA
ttgtggtcaaaatctgcaatggcataagaatgtttcaaactccaggtccacagagagttagaggagaagcctacactgga

SEQ ID NO: 109706 - DNA, 80 bp, synthetic construct; identical to SEQ ID NO: 21434
  source 1..80: mol_type = other DNA

SEQ ID NO: 109707 - DNA, 80 bp, synthetic construct
  source 1..80: mol_type = other DNA
agaaaaataaaaatattccccaagcacctgtaaagtagctaataaaagacggatgggaaaccgtttctcagctagagtcc

SEQ ID NO: 109708 - DNA, 80 bp, synthetic construct
  source 1..80: mol_type = other DNA
aatattcttatattctttgaaataccataacctcattttcagcctacagcttgcagagggcacatatgaaagcatttgag

SEQ ID NO: 109709 - DNA, 80 bp, synthetic construct; identical to SEQ ID NO: 21435
  source 1..80: mol_type = other DNA

SEQ ID NO: 109710 - DNA, 80 bp, synthetic construct
  source 1..80: mol_type = other DNA
tcctctgtgtttccttttgctttctttaacagctcctcagtcttcctgatgacaaaatgatgggctgtctttggcaatgc

SEQ ID NO: 109711 - DNA, 80 bp, synthetic construct
  source 1..80: mol_type = other DNA
aggtctatgggagtaaaggcttgctttggtgtgtcaggcccaagcttgtccagggaggagtgtaaaggctcagggttcac

SEQ ID NO: 109712 - DNA, 80 bp, synthetic construct
  source 1..80: mol_type = other DNA
ggtgatctcagaaagttctctagatattgcagctgagaggaagagaggaaacaaaagaaatggcagtcggtattccacct

SEQ ID NO: 109713 - DNA, 80 bp, synthetic construct
  source 1..80: mol_type = other DNA
ccagcctggacaacatagggagatcccatctctacaaaaaatacaataaaaatcagctgagcatcgtggtgtatgcctgt

SEQ ID NO: 109714 - DNA, 80 bp, synthetic construct; identical to SEQ ID NO: 21436
  source 1..80: mol_type = other DNA

SEQ ID NO: 109715 - DNA, 80 bp, synthetic construct
  source 1..80: mol_type = other DNA
tggctcttctgaagagaaacaaagacaactgaagtcaaagaaatacagtgtaatccctgtaagtgtaaaactgcttacac

SEQ ID NO: 109716 - DNA, 80 bp, synthetic construct
  source 1..80: mol_type = other DNA
ctgaaaagagatatagtcaagtcagaatacaggtacttcactgcaatagcttaaaaactgtttttgatattattaggttg

SEQ ID NO: 109717 - DNA, 80 bp, synthetic construct; identical to SEQ ID NO: 21437
  source 1..80: mol_type = other DNA

SEQ ID NO: 109718 - DNA, 80 bp, synthetic construct
  source 1..80: mol_type = other DNA
ggcacaatctcggctcactgcaacctccgcctcctgggttcaagcgattctcctgcctcagcctccagagtagctgggat

SEQ ID NO: 109719 - DNA, 80 bp, synthetic construct
  source 1..80: mol_type = other DNA
cttaaaaaatggctgcagactgggcgtggtggcccacgcctgtagtcccagcactttgggaggccaaggccagtggatcc

SEQ ID NO: 109720 - DNA, 80 bp, synthetic construct
  source 1..80: mol_type = other DNA
agagagctgcaattgtgccactgcactccagcctgggcgacagagtgagaccctgtctcacacacacaaaataataataa

SEQ ID NO: 109721 - DNA, 80 bp, synthetic construct; identical to SEQ ID NO: 21438
  source 1..80: mol_type = other DNA

SEQ ID NO: 109722 - DNA, 80 bp, synthetic construct
  source 1..80: mol_type = other DNA
agtggcgtgatcatggctcactgcaatctctgcctcctgggctcaagccgttctccatcagctccccgattagctgggac

SEQ ID NO: 109723 - DNA, 80 bp, synthetic construct
  source 1..80: mol_type = other DNA
aaaaagtaaacgtatgttgacagacttttcaaataatcatctttgttattacaccaaaatttgataagtgttagtttctt

SEQ ID NO: 109724 - DNA, 80 bp, synthetic construct
  source 1..80: mol_type = other DNA
gggctggaatgcagtggtgtgatctcgacttactgcaacctccgcctcctgggttcaagtgattctcccgcctcagcctc

SEQ ID NO: 109725 - DNA, 80 bp, synthetic construct; identical to SEQ ID NO: 21439
  source 1..80: mol_type = other DNA

SEQ ID NO: 109726 - DNA, 80 bp, synthetic construct
  source 1..80: mol_type = other DNA
agtcctggggcagctatcaagttcatggtagtatatacacgttttttaatatcttgatttccacctgagagttgactttt

SEQ ID NO: 109727 - DNA, 80 bp, synthetic construct
  source 1..80: mol_type = other DNA
tcaaataaaactggcattccatgaaaaaaggcagctacttcacctctcaattcaaataactgcatgagggccagaggtca

SEQ ID NO: 109728 - DNA, 80 bp, synthetic construct
  source 1..80: mol_type = other DNA
attgtttttaatggagagaagatgtcagggaagaatgcaaggcctcttgggataggacacttcaatgcctgccttgattc

SEQ ID NO: 109729 - DNA, 80 bp, synthetic construct
  source 1..80: mol_type = other DNA
gtaggaggatcgtttgagtccaggagtttaagactagcctgggcaacatagtgagacctcatctccaccaaaaaaaaaaa

SEQ ID NO: 109730 - DNA, 80 bp, synthetic construct; identical to SEQ ID NO: 21440
  source 1..80: mol_type = other DNA

SEQ ID NO: 109731 - DNA, 80 bp, synthetic construct
  source 1..80: mol_type = other DNA
tttaggtcagaattctatctggcataattaggcttctcaaagtgaggcttgcaagtgagtcactgtgcctgggcagaggg

SEQ ID NO: 109732 - DNA, 80 bp, synthetic construct
  source 1..80: mol_type = other DNA
cccagaggagttccttttccacctgcttagagacaagggcagaacatatatgaacactgagcccaactattagaaaaact

SEQ ID NO: 109733 - DNA, 80 bp, synthetic construct
  source 1..80: mol_type = other DNA
ccccagggatttgcaataagtgtcaaaaacaagtttacaacagcaagtggtcccttagatctaaaagagagctcctcctg

SEQ ID NO: 109734 - DNA, 80 bp, synthetic construct; identical to SEQ ID NO: 21441
  source 1..80: mol_type = other DNA

SEQ ID NO: 109735 - DNA, 80 bp, synthetic construct
  source 1..80: mol_type = other DNA
aaatgagcagtgtgaaattttcccaaccacatactaaatctgacccaaagggtcagcttcaccagaaagcagaggagaga

SEQ ID NO: 109736 - DNA, 80 bp, synthetic construct
  source 1..80: mol_type = other DNA
aaggggtagaagtagcacaccctaaaatggaagagaagaacacagggggttagtgtgtggttttaggttattctggttaa

SEQ ID NO: 109737 - DNA, 80 bp, synthetic construct
  source 1..80: mol_type = other DNA
taaggtttgatgtctcattaagcctcaagataacttaaaaaagcacaatacagatgacaacttcagtggctgcaacccac

SEQ ID NO: 109738 - DNA, 80 bp, synthetic construct; identical to SEQ ID NO: 21442
  source 1..80: mol_type = other DNA

SEQ ID NO: 109739 - DNA, 80 bp, synthetic construct
  source 1..80: mol_type = other DNA
atgttttccagagacaaagttgcaaaacagataagtaccaaagacactttttaccatagctattctgtgtgtcagcataa

SEQ ID NO: 109740 - DNA, 80 bp, synthetic construct
  source 1..80: mol_type = other DNA
caatgaaagtcaagaaatgcaaactgtaatcaactgaattaaatacttcagagtgtcaactcagtgccagccacggaact

SEQ ID NO: 109741 - DNA, 80 bp, synthetic construct; identical to SEQ ID NO: 21443
  source 1..80: mol_type = other DNA

SEQ ID NO: 109742 - DNA, 80 bp, synthetic construct
  source 1..80: mol_type = other DNA
tttttttcttgagatggggtctcactctatcacccaggctggaggacagtggcatgatcgtggctcactgctacctccaa

SEQ ID NO: 109743 - DNA, 80 bp, synthetic construct
  source 1..80: mol_type = other DNA
gcccagctgaaggcatgattttttaaatcaacgtgttagtatggcataatttgcttacaataaaattagtcaatcttgct

SEQ ID NO: 109744 - DNA, 80 bp, synthetic construct; identical to SEQ ID NO: 21444
  source 1..80: mol_type = other DNA

SEQ ID NO: 109745 - DNA, 80 bp, synthetic construct
  source 1..80: mol_type = other DNA
cccagctactcaggaggctgaggcaggagaatggcgtgaacccaggaggcggaatttgcagtgagccgagattacgccac

SEQ ID NO: 109746 - DNA, 80 bp, synthetic construct
  source 1..80: mol_type = other DNA
gagttcagtggcgcaatctcgactcactgcaacctccaccttctggattcaagcaattctcctgcctcagtctcccgagt

SEQ ID NO: 109747 - DNA, 80 bp, synthetic construct
  source 1..80: mol_type = other DNA
ctgtacccggccaagaatatttttaaaactgtctaaagattcctgttatgtgatccatggtttcacttctaagaatttat

SEQ ID NO: 109748 - DNA, 80 bp, synthetic construct; identical to SEQ ID NO: 21445
  source 1..80: mol_type = other DNA

SEQ ID NO: 109749 - DNA, 80 bp, synthetic construct
  source 1..80: mol_type = other DNA
gcaacatggcaaaaccccatcttaaaaaaaaaatacaaaaaaaaaaaaaaaattagccaggcatggtggcatgcacctgt

SEQ ID NO: 109750 - DNA, 80 bp, synthetic construct
  source 1..80: mol_type = other DNA
gctcacacctgtaatcccagcactatgggaggccaaggcaggagatcacttgaggccaggggttcaagaccagcctgggc

SEQ ID NO: 109751 - DNA, 80 bp, synthetic construct
  source 1..80: mol_type = other DNA
gcactccagcctgggcaacagagcaagaccctgtctcaggaagaaaaaaaaaaaatcatgctttccacgtgcctgtactc

SEQ ID NO: 109752 - DNA, 80 bp, synthetic construct
  source 1..80: mol_type = other DNA
caaagctattcagagacacacccgcaaatatatctgactgtagtaagtattcaaatgaaaagaagtgaagttacgaacaa

SEQ ID NO: 109753 - DNA, 80 bp, synthetic construct; identical to SEQ ID NO: 21446
  source 1..80: mol_type = other DNA

SEQ ID NO: 109754 - DNA, 80 bp, synthetic construct
  source 1..80: mol_type = other DNA
ttcactacctgggttctcactgcctgtgggatcctgttaatggggataggctcctatttatgcattctcagcatgactag

SEQ ID NO: 109755 - DNA, 80 bp, synthetic construct
  source 1..80: mol_type = other DNA
aatttatgcacttacagtatttccctgcttcttaaaaggacttttcatattttaatatctaaaactgggaaccatcgtct

SEQ ID NO: 109756 - DNA, 80 bp, synthetic construct
  source 1..80: mol_type = other DNA
ccactctggcagctgcttccaattctgttagctgaattgttatcctgcctctatagttctaaagaatatgccctgtgctt

SEQ ID NO: 109757 - DNA, 80 bp, synthetic construct
  source 1..80: mol_type = other DNA
gtaactgtttttgttgttttcaaaattgatttcaacattatgactacctaagtactactcatggctgagccacagagtat

SEQ ID NO: 109758 - DNA, 80 bp, synthetic construct; identical to SEQ ID NO: 21447
  source 1..80: mol_type = other DNA

SEQ ID NO: 109759 - DNA, 80 bp, synthetic construct
  source 1..80: mol_type = other DNA
tccagtgattaactgaggaaggacatatgggaaggaaatttgagtccatgcatatctgaaagtgtctcatatttgataga

SEQ ID NO: 109760 - DNA, 80 bp, synthetic construct
  source 1..80: mol_type = other DNA
attgagacctggtggcattcttttttattgatttagctgggcaccaggtaagccccttcaatctggaaactcatatcctt

SEQ ID NO: 109761 - DNA, 80 bp, synthetic construct
  source 1..80: mol_type = other DNA
tcaaacgattctcctgcctcagcctcccaagtagctgggattacaggcacccaccaccatgcccgactaattttttgcag

SEQ ID NO: 109762 - DNA, 80 bp, synthetic construct; identical to SEQ ID NO: 21448
  source 1..80: mol_type = other DNA

SEQ ID NO: 109763 - DNA, 80 bp, synthetic construct
  source 1..80: mol_type = other DNA
tttagtctcaaaatggtctttttctgtggcatcctgatgcttacatatgcacaaacatcttatctctgtggctatggtag

SEQ ID NO: 109764 - DNA, 80 bp, synthetic construct
  source 1..80: mol_type = other DNA
tgagtgaggctctctataagctgactgaggagccttccaagttaatatagttggttgaacatatgcactcaactgtacaa

SEQ ID NO: 109765 - DNA, 80 bp, synthetic construct
  source 1..80: mol_type = other DNA
ctaagctgccactgtctcaaagtgaagagtcaactgattatactacagaatccttaaaatcatgaggaacttatagcatc

SEQ ID NO: 109766 - DNA, 80 bp, synthetic construct; identical to SEQ ID NO: 21449
  source 1..80: mol_type = other DNA

SEQ ID NO: 109767 - DNA, 80 bp, synthetic construct
  source 1..80: mol_type = other DNA
tagtcagacccctaccagcctgaaaatcagaagactactttctaaaaaacatgaccagctcaagaagaaaacaataccga

SEQ ID NO: 109768 - DNA, 80 bp, synthetic construct
  source 1..80: mol_type = other DNA
aaaagaaggaagcttagaagaaacagattatgcagggaaaagaaaactccttgtataagtatacagtcatgtgtcactta

SEQ ID NO: 109769 - DNA, 80 bp, synthetic construct; identical to SEQ ID NO: 21450
  source 1..80: mol_type = other DNA

SEQ ID NO: 109770 - DNA, 80 bp, synthetic construct
  source 1..80: mol_type = other DNA
tcataccaacatacatcactggaaatttcagaatattatgacaacaaagagaactccctaccagctcccctagagaaaaa

SEQ ID NO: 109771 - DNA, 80 bp, synthetic construct
  source 1..80: mol_type = other DNA
accagccaaaacactgcatccttcctcaaaaagctcctagaggctatgtcctattaaacaagagtaaaccaagaaagaag

SEQ ID NO: 109772 - DNA, 80 bp, synthetic construct
  source 1..80: mol_type = other DNA
actatctttttaatgagggacagagccaggtgaccctggcctgtataacttgtctgtacttagcttgtcttaactacata

SEQ ID NO: 109773 - DNA, 80 bp, synthetic construct
  source 1..80: mol_type = other DNA
tgctagaagccttgccagacgctctgatgagggtaagccttgtgtttcccagactcattcatgaccttgtgcactgactt

SEQ ID NO: 109774 - DNA, 80 bp, synthetic construct; identical to SEQ ID NO: 21451
  source 1..80: mol_type = other DNA

SEQ ID NO: 109775 - DNA, 80 bp, synthetic construct
  source 1..80: mol_type = other DNA
tatacttctctacatataatctcacaataaactgctttaagctggctgaggctctgtgtggtagaggcagtgtctgtggt

SEQ ID NO: 109776 - DNA, 80 bp, synthetic construct
  source 1..80: mol_type = other DNA
aggagctgggcctcccacagctcagtctgtaaatttcctttatctccctcgctcagtcttaccctcagttccactctcca

SEQ ID NO: 109777 - DNA, 80 bp, synthetic construct
  source 1..80: mol_type = other DNA
ctgaagtcctttctccattttgcaaagccagatttatatatatgctaaattgtttttctgcagtccccttgtttttagcc

SEQ ID NO: 109778 - DNA, 80 bp, synthetic construct; identical to SEQ ID NO: 21452
  source 1..80: mol_type = other DNA

SEQ ID NO: 109779 - DNA, 80 bp, synthetic construct
  source 1..80: mol_type = other DNA
catcattggctagaagagttgggttgacaaattataaagggctgaatgtttgtggaacatccaaatgatggaatattagt

SEQ ID NO: 109780 - DNA, 80 bp, synthetic construct
  source 1..80: mol_type = other DNA
agattagtggctgcctagggattggagtggcgaggaagaaaactgaatttcttttcaaaatttccctgtctgccgttaaa

SEQ ID NO: 109781 - DNA, 80 bp, synthetic construct
  source 1..80: mol_type = other DNA
ttcttcaaaagtctccaggttttctttcatactgtaatgagaacgcaaaaaggagacgaagttgcaagggtacattccat

SEQ ID NO: 109782 - DNA, 80 bp, synthetic construct; identical to SEQ ID NO: 21453
  source 1..80: mol_type = other DNA

SEQ ID NO: 109783 - DNA, 80 bp, synthetic construct
  source 1..80: mol_type = other DNA
atgatgatagctctctgtaaaatttatacttttccattgccgaattcagtacgagcttcttgagaaaaaaactgtcttac

SEQ ID NO: 109784 - DNA, 80 bp, synthetic construct
  source 1..80: mol_type = other DNA
taagagtgaaagaaattgaacatcttaatttagccttacctagaccctgtggaaacccacggccacagtatacataaagg

SEQ ID NO: 109785 - DNA, 80 bp, synthetic construct; identical to SEQ ID NO: 21454
  source 1..80: mol_type = other DNA

SEQ ID NO: 109786 - DNA, 80 bp, synthetic construct
  source 1..80: mol_type = other DNA
cttagtcctgtactgctgcaatacagacggaggctgtttttcagtttatcaacaatcataaagttttacatcctaccact

SEQ ID NO: 109787 - DNA, 80 bp, synthetic construct
  source 1..80: mol_type = other DNA
ccttacagcatatgagcaattaatcaataatgaaagcattcacctcacagggcccaacaggtatatgaggagatctgtac

SEQ ID NO: 109788 - DNA, 80 bp, synthetic construct
  source 1..80: mol_type = other DNA
gcattgtacagtacatgaagaggctctaaacactgagagaatcacaaatcacaagttgactcacgtactcatttccctat

SEQ ID NO: 109789 - DNA, 80 bp, synthetic construct; identical to SEQ ID NO: 21455
  source 1..80: mol_type = other DNA

SEQ ID NO: 109790 - DNA, 80 bp, synthetic construct
  source 1..80: mol_type = other DNA
cttcaaagcagtatttagagaccagtaaattaaaatatatatatatggaaacctttcagcacgcctacagtttaaatatt

SEQ ID NO: 109791 - DNA, 80 bp, synthetic construct
  source 1..80: mol_type = other DNA
caaaagactactatgtaggttaagacatccattattcctattagaataggaatctatgagtctgggaataaagttttaaa

SEQ ID NO: 109792 - DNA, 80 bp, synthetic construct
  source 1..80: mol_type = other DNA
acttatccatgattaacaaaacgtactcttttggaaaagataagtgttttgcaatctgaactaaatgatgtgcctcaaaa

SEQ ID NO: 109793 - DNA, 80 bp, synthetic construct; identical to SEQ ID NO: 21456
  source 1..80: mol_type = other DNA

SEQ ID NO: 109794 - DNA, 80 bp, synthetic construct
  source 1..80: mol_type = other DNA
atagaaaacaagtccaggaactaaaacagattaaacaaataaccctgagtatggctgcacgccactgttaaaactaaaac

SEQ ID NO: 109795 - DNA, 80 bp, synthetic construct
  source 1..80: mol_type = other DNA
gaccatactcctaaatggttaacagaaactttaagccatttttctattagctaaaagataatttagaaacagggattccc

SEQ ID NO: 109796 - DNA, 80 bp, synthetic construct
  source 1..80: mol_type = other DNA
agtaccaactctggacaacattctatttgagaaaagccaaatgcctagaaggttttaaactctaaaagttaaaatctagc

SEQ ID NO: 109797 - DNA, 80 bp, synthetic construct
  source 1..80: mol_type = other DNA
acccagtaacgagaggatggataaacgagtggcggctttgcccacatattcgttaatcctgtccaagaggtgctgaaaat

SEQ ID NO: 109798 - DNA, 80 bp, synthetic construct; identical to SEQ ID NO: 21457
  source 1..80: mol_type = other DNA

SEQ ID NO: 109799 - DNA, 80 bp, synthetic construct
  source 1..80: mol_type = other DNA
atggtttggcctcaagtatcaattaggtagtagaagttacatttcagaccagagtaaacaaaaaaacaagacgggccagg

SEQ ID NO: 109800 - DNA, 80 bp, synthetic construct
  source 1..80: mol_type = other DNA
aagatgtactgtaaaaggcatgcaatacaaggtcttcaaatcctggggaagttgctctcatatatacacttaagacttac

SEQ ID NO: 109801 - DNA, 80 bp, synthetic construct; identical to SEQ ID NO: 21458
  source 1..80: mol_type = other DNA

SEQ ID NO: 109802 - DNA, 80 bp, synthetic construct
  source 1..80: mol_type = other DNA
ccacgcccagctaattttttgtattttttagtagagacggggtttcactgtgttggccaggctggtctcaaactcgtgac

SEQ ID NO: 109803 - DNA, 80 bp, synthetic construct
  source 1..80: mol_type = other DNA
actgggaacaatgtcatcagtggcgcacagaaatcaaaagaataagctcaggacaagttgcacagtggccgtgcacagaa

SEQ ID NO: 109804 - DNA, 80 bp, synthetic construct
  source 1..80: mol_type = other DNA
aatcaagaaaagggcaatggatgatacttattccccttaacatcctaaatttaccttacacagcttcctgtcacaaaatc

SEQ ID NO: 109805 - DNA, 80 bp, synthetic construct
  source 1..80: mol_type = other DNA
gagtctcactctgttgccaggctggagtgcagtggcacaatctcagctcactgcaacctctgcctcctgggttcaagcaa

SEQ ID NO: 109806 - DNA, 80 bp, synthetic construct; identical to SEQ ID NO: 21459
  source 1..80: mol_type = other DNA

SEQ ID NO: 109807 - DNA, 80 bp, synthetic construct
  source 1..80: mol_type = other DNA
tccacagacacagacacagtttgtgcatgtgtgtgttttttccactgaacagtatgttgtaaccaccttcccacgtcagc

SEQ ID NO: 109808 - DNA, 80 bp, synthetic construct
  source 1..80: mol_type = other DNA
cccaaatggtatgtgttttaaaattgatgactgatgctccaaaaggctgaacatcaattcatattcctgctaacagtgcc

SEQ ID NO: 109809 - DNA, 80 bp, synthetic construct; identical to SEQ ID NO: 21460
  source 1..80: mol_type = other DNA

SEQ ID NO: 109810 - DNA, 80 bp, synthetic construct
  source 1..80: mol_type = other DNA
aggatattattttgctaaccagaattgaggttctctttaaagacagctgtcacgtcgtcccgcacacccagcatggggga

SEQ ID NO: 109811 - DNA, 80 bp, synthetic construct
  source 1..80: mol_type = other DNA
cccatttttctccataaaaaaagaaaatacctgcaagacaaactaatgcacgtgttcaatgcaatggaaagtttggccag

SEQ ID NO: 109812 - DNA, 80 bp, synthetic construct
  source 1..80: mol_type = other DNA
taaaaactgataccagtcacagcaacttaatgataggatcaaatctaagttttattcctacttctgattctaccttgggt

SEQ ID NO: 109813 - DNA, 80 bp, synthetic construct; identical to SEQ ID NO: 21461
  source 1..80: mol_type = other DNA

SEQ ID NO: 109814 - DNA, 80 bp, synthetic construct
  source 1..80: mol_type = other DNA
cccccactttgatctctgaggctatatttgttaaaacaagtaacaacagttatcattcataagcactgtacacctttcac

SEQ ID NO: 109815 - DNA, 80 bp, synthetic construct
  source 1..80: mol_type = other DNA
cccgactccaaagccccaagcccttaagtgtcacactaagctaacctgtggttttgatcatcacagcaagtctgtgatgt

SEQ ID NO: 109816 - DNA, 80 bp, synthetic construct
  source 1..80: mol_type = other DNA
cctgggccccttccaaaactgtattttgggctcaggaatctatattttaataagcactccaggtaattcttaaagtgaga

SEQ ID NO: 109817 - DNA, 80 bp, synthetic construct
  source 1..80: mol_type = other DNA
agaccaacctggccaacatggtgaagccccgtctctactaaaaatacaaaaattagctggtgtggtggcgtgtgcctgta

SEQ ID NO: 109818 - DNA, 80 bp, synthetic construct; identical to SEQ ID NO: 21462
  source 1..80: mol_type = other DNA

SEQ ID NO: 109819 - DNA, 80 bp, synthetic construct
  source 1..80: mol_type = other DNA
ccgttggtaagattctaccgtaaaagttcaaaaccaaaaagcgattagtatggtatcaggtacatataaacactcgctgc

SEQ ID NO: 109820 - DNA, 80 bp, synthetic construct
  source 1..80: mol_type = other DNA
ttcaataaaattgttacttacctactatttgtctagggagactctgagtttgccttctgtgtagtcagaagacgataatg

SEQ ID NO: 109821 - DNA, 80 bp, synthetic construct; identical to SEQ ID NO: 21463
  source 1..80: mol_type = other DNA

SEQ ID NO: 109822 - DNA, 80 bp, synthetic construct
  source 1..80: mol_type = other DNA
atagcttttggaatcagtcccacaactagaatatctcctttttaagcacattcaaacatttgagggtctacagtaagtgc

SEQ ID NO: 109823 - DNA, 80 bp, synthetic construct
  source 1..80: mol_type = other DNA
acatgttaaacacactttacagcctatagaagactggctgagaaaagtcaattaaagattagcaccacagacacaaggaa

SEQ ID NO: 109824 - DNA, 80 bp, synthetic construct; identical to SEQ ID NO: 21464
  source 1..80: mol_type = other DNA

SEQ ID NO: 109825 - DNA, 80 bp, synthetic construct
  source 1..80: mol_type = other DNA
caccacatctaatccatcagcaaaccctttgctatcacctcagtcgaagcccgcatcatctctcagagacaagggagcag

SEQ ID NO: 109826 - DNA, 80 bp, synthetic construct
  source 1..80: mol_type = other DNA
cattatggaacttatgaaactcatgagtagcctacaaggcctcataagatccagccagttattaacctcccaacccccct

SEQ ID NO: 109827 - DNA, 80 bp, synthetic construct
  source 1..80: mol_type = other DNA
tcccctgaccacccaatctaaagcagcagggaggttctcagtcatcacttttcaataaaagatactttgtaattcatgag

SEQ ID NO: 109828 - DNA, 80 bp, synthetic construct; identical to SEQ ID NO: 21465
  source 1..80: mol_type = other DNA

SEQ ID NO: 109829 - DNA, 80 bp, synthetic construct
  source 1..80: mol_type = other DNA
ctcccaccttggcctcccaaagtgctgggattacgggtgtgagccaccacacctggccaaaaatgtcttaaaaatgagga

SEQ ID NO: 109830 - DNA, 80 bp, synthetic construct
  source 1..80: mol_type = other DNA
acaaggttccttccagaaaaccatctaccagaaactttcctgaattctgctttgtccaaaaatgttaccaatgacgctgt

SEQ ID NO: 109831 - DNA, 80 bp, synthetic construct
  source 1..80: mol_type = other DNA
aaatttgagatttacttttgtatcccagaatttacattttatgatggtgatatttagcttggggacctcaatgatctgaa

SEQ ID NO: 109832 - DNA, 80 bp, synthetic construct
  source 1..80: mol_type = other DNA
tcaagaccctacttatgaaccaatgtagagctgtaagacaaaaatccctaccttattttacaattcctacgacagaggtg

SEQ ID NO: 109833 - DNA, 80 bp, synthetic construct; identical to SEQ ID NO: 21466
  source 1..80: mol_type = other DNA

SEQ ID NO: 109834 - DNA, 80 bp, synthetic construct
  source 1..80: mol_type = other DNA
tggagagcttacagaaactctggagcaggttaactaagggatggaatccggacatcacatttggtttgtttttataaacc

SEQ ID NO: 109835 - DNA, 80 bp, synthetic construct
  source 1..80: mol_type = other DNA
gaaaattgacatgtttgaacccgaatcctcacctgtaaaatggggaaacaccaaaagcgtggctgtgaagaagaaagtaa

SEQ ID NO: 109836 - DNA, 80 bp, synthetic construct
  source 1..80: mol_type = other DNA
attccctcccatcttcctctaaccactggcctggttatagcttacctgttctagcgacaactggtacttcagtttccagt

SEQ ID NO: 109837 - DNA, 80 bp, synthetic construct; identical to SEQ ID NO: 21467
  source 1..80: mol_type = other DNA

SEQ ID NO: 109838 - DNA, 80 bp, synthetic construct
  source 1..80: mol_type = other DNA
accgtaagttacctcgtctgtaaagttagaataatgatggcatcaagctcacaaggcttgtggggattacatgagatgat

SEQ ID NO: 109839 - DNA, 80 bp, synthetic construct
  source 1..80: mol_type = other DNA
ccaccaccttgactcactggcctttcagttccttggctaagccacatgctccccattcctgagcctaagagagtctacct

SEQ ID NO: 109840 - DNA, 80 bp, synthetic construct; identical to SEQ ID NO: 21468
  source 1..80: mol_type = other DNA

SEQ ID NO: 109841 - DNA, 80 bp, synthetic construct
  source 1..80: mol_type = other DNA
cactgcaacctcaaactcctaggctcaagtgatcctcccacctcagcctcccgagtagctaggaatacagatgcactcca

SEQ ID NO: 109842 - DNA, 80 bp, synthetic construct
  source 1..80: mol_type = other DNA
aataaatgtgcaaagcctaattctgccttcaggcagcatgacttaagtttactacaaaagagacataaaatgtttgtgaa

SEQ ID NO: 109843 - DNA, 80 bp, synthetic construct
  source 1..80: mol_type = other DNA
gggtccttcaaactatatttaggtacaatctgatcactagatggtaaactccatgaggacaggaaccatctgggacacct

SEQ ID NO: 109844 - DNA, 80 bp, synthetic construct; identical to SEQ ID NO: 21469
  source 1..80: mol_type = other DNA

SEQ ID NO: 109845 - DNA, 80 bp, synthetic construct
  source 1..80: mol_type = other DNA
ccagaaaagagggatcataccattctgacagggagtgcttgcctggccacactcactgcaagtcacagggcttgaattaa

SEQ ID NO: 109846 - DNA, 80 bp, synthetic construct
  source 1..80: mol_type = other DNA
tggcacatgcctgtaatcccagctactcgggaggctaaggcaggagaatcacttgaacccaggaggtggaggttgcaatg

SEQ ID NO: 109847 - DNA, 80 bp, synthetic construct
  source 1..80: mol_type = other DNA
ctaatcccggttggacattttacctgaaaagaaatatctaaggcaagggtaaaattaggatctacgctagatgagatcct

SEQ ID NO: 109848 - DNA, 80 bp, synthetic construct
  source 1..80: mol_type = other DNA
cctcaacctcccaagtagctgggaatacaggcacgcaccaccatgcccaactaatttttgtatttttttgtagagacagg

SEQ ID NO: 109849 - DNA, 80 bp, synthetic construct; identical to SEQ ID NO: 21470
  source 1..80: mol_type = other DNA

SEQ ID NO: 109850 - DNA, 80 bp, synthetic construct
  source 1..80: mol_type = other DNA
cagaacaccagtgtcaatccacgtccttatcttcgaaagccaaatttaaaaagaaacctgcctccagatctagacttttt

SEQ ID NO: 109851 - DNA, 80 bp, synthetic construct
  source 1..80: mol_type = other DNA
tctgttttcactgttcatcttaactaatatcattctttaggtgtttacagacggatggcttatatgcctaggattacaca

SEQ ID NO: 109852 - DNA, 80 bp, synthetic construct
  source 1..80: mol_type = other DNA
ctttagaatggatttatctgaaattacaggtgaatattcgaatttttcaaaaacaagtgctgtgatatgtggcctagaca

SEQ ID NO: 109853 - DNA, 80 bp, synthetic construct; identical to SEQ ID NO: 21471
  source 1..80: mol_type = other DNA

SEQ ID NO: 109854 - DNA, 80 bp, synthetic construct
  source 1..80: mol_type = other DNA
atctaaaaagggtaagatacttgctcccattctctcttcctatcagtgcctagaaggaaggaaaaaagggtaggaaataa

SEQ ID NO: 109855 - DNA, 80 bp, synthetic construct
  source 1..80: mol_type = other DNA
aggggccttgatggatggtttgctaaagcttatagcctatcccaaaggtgaagaatcttctagtaacttaagtgtaaggc

SEQ ID NO: 109856 - DNA, 80 bp, synthetic construct
  source 1..80: mol_type = other DNA
ttcaaaaagacactacgcagagcttctcctaaaagagatacaagcaaactgtgagatatctttaggtttcaggtttatag

SEQ ID NO: 109857 - DNA, 80 bp, synthetic construct; identical to SEQ ID NO: 21472
  source 1..80: mol_type = other DNA

SEQ ID NO: 109858 - DNA, 80 bp, synthetic construct
  source 1..80: mol_type = other DNA
ctgggtacactacagaaatttaacaaagtaatttataacccagacagtacataaggccaccttctgacttgggcctttcc

SEQ ID NO: 109859 - DNA, 80 bp, synthetic construct
  source 1..80: mol_type = other DNA
gatgggacataaagggtagaagagaaatttggtccatagcttcccacagattttcagagggcaactgagtccacacacct

SEQ ID NO: 109860 - DNA, 80 bp, synthetic construct; identical to SEQ ID NO: 21473
  source 1..80: mol_type = other DNA

SEQ ID NO: 109861 - DNA, 80 bp, synthetic construct
  source 1..80: mol_type = other DNA
aaaatggatacagttcaagtttgttactatgctctgtgaactactcaaagtagcagagtcttaatgattgcagacattaa

SEQ ID NO: 109862 - DNA, 80 bp, synthetic construct
  source 1..80: mol_type = other DNA
cttaagagagtgacctgtgagttgtagggcagtaactactatgctttattttggactaaagcatggtttttaagacattt

SEQ ID NO: 109863 - DNA, 80 bp, synthetic construct
  source 1..80: mol_type = other DNA
ttgcatttttattctctcccatgaaaacagacataaagttactaatttctagcaactacagtcttaaaaagtaaaccaga

SEQ ID NO: 109864 - DNA, 80 bp, synthetic construct; identical to SEQ ID NO: 21474
  source 1..80: mol_type = other DNA

SEQ ID NO: 109865 - DNA, 80 bp, synthetic construct
  source 1..80: mol_type = other DNA
taacaggttgactcaatcgatttagtcagaatatttaaatgacaccccaaaggactttaaatcacagaaatgtaggccta

SEQ ID NO: 109866 - DNA, 80 bp, synthetic construct
  source 1..80: mol_type = other DNA
atccaattaattccaggaaaagctaattttagttcactatggccctggaacccagaaataaacatacctgtagccaaaca

SEQ ID NO: 109867 - DNA, 80 bp, synthetic construct
  source 1..80: mol_type = other DNA
tcctcaacctccggtgcacataagaatcagtcttcttccaaaatatatatacaaggtgtccgaatatgtaggtctaccta

SEQ ID NO: 109868 - DNA, 80 bp, synthetic construct; identical to SEQ ID NO: 21475
  source 1..80: mol_type = other DNA

SEQ ID NO: 109869 - DNA, 80 bp, synthetic construct
  source 1..80: mol_type = other DNA
aacgtaccaagtgtttatgacaccaggaaatgcatgcagcagagaaagtttacatcatctgcccttctaggcacgtgata

SEQ ID NO: 109870 - DNA, 80 bp, synthetic construct
  source 1..80: mol_type = other DNA
caatagcaaagaatgtttcactgtttctgaggagcctcatttgcctgatgcatgactgttaaaggtgcatttccctacac

SEQ ID NO: 109871 - DNA, 80 bp, synthetic construct
  source 1..80: mol_type = other DNA
tcctgaaatttacagctccactttgccggcctgtttgaattcagatgactccaagttgatcccaaaattataaatcaaag

SEQ ID NO: 109872 - DNA, 80 bp, synthetic construct
  source 1..80: mol_type = other DNA
aaatactttttagcctaatttagactaacaagttcacatgcacaacactgccatcccaaacaaaagctaaggcggataag

SEQ ID NO: 109873 - DNA, 80 bp, synthetic construct; identical to SEQ ID NO: 21476
  source 1..80: mol_type = other DNA

SEQ ID NO: 109874 - DNA, 80 bp, synthetic construct
  source 1..80: mol_type = other DNA
accaaaggagataatgactgccaagcactttcacagtgcctggcacacagagagcactccattaacgttagctgttgttc

SEQ ID NO: 109875 - DNA, 80 bp, synthetic construct
  source 1..80: mol_type = other DNA
taggaggggctctgcaaatagctgtctcttaggaatcccctttgcccactttaaggtaactgtctttcaccaccaattaa

SEQ ID NO: 109876 - DNA, 80 bp, synthetic construct; identical to SEQ ID NO: 21477
  source 1..80: mol_type = other DNA

SEQ ID NO: 109877 - DNA, 80 bp, synthetic construct
  source 1..80: mol_type = other DNA
ggggagagctctccgaaccccccttccccgggatccctaccaagcaagtgagtctcttgctccagcccctccgagcctcc

SEQ ID NO: 109878 - DNA, 80 bp, synthetic construct
  source 1..80: mol_type = other DNA
cgtcgtgaaagggccaaggccgacggcggcctccgccacgaaaaagagtccccctccggacctcccctccttctcgaaag

SEQ ID NO: 109879 - DNA, 80 bp, synthetic construct
  source 1..80: mol_type = other DNA
gtgactccgcgaaggaggcaaaaagaagggccggcgcggcgggaggagccacgcgagagcccgagggggcggggcgggcg

SEQ ID NO: 109880 - DNA, 80 bp, synthetic construct
  source 1..80: mol_type = other DNA
cgatcctgtttcccaaggagctgctggggcccgcgtgggtgaagggcctgcttgggagctttggagttgcagctcacctg

SEQ ID NO: 109881 - DNA, 80 bp, synthetic construct; identical to SEQ ID NO: 21478
  source 1..80: mol_type = other DNA

SEQ ID NO: 109882 - DNA, 80 bp, synthetic construct
  source 1..80: mol_type = other DNA
aactgtgggatatgaaaggcattttgaaggagtaggcatcaggttgggttttaaaggaaatgtaggttttgtgaaatact

SEQ ID NO: 109883 - DNA, 80 bp, synthetic construct
  source 1..80: mol_type = other DNA
atgggaataacaggttttgtcatgggaaccaattgggtcacagtgcaaggcagccatggttaaggggggccaggtgtgtg

SEQ ID NO: 109884 - DNA, 80 bp, synthetic construct; identical to SEQ ID NO: 21479
  source 1..80: mol_type = other DNA

SEQ ID NO: 109885 - DNA, 80 bp, synthetic construct
  source 1..80: mol_type = other DNA
tggggtgaagtcagtgagtcattaagctctaagtggcacagagcctactccagttaatgttatttttgataactgttaag

SEQ ID NO: 109886 - DNA, 80 bp, synthetic construct
  source 1..80: mol_type = other DNA
actttacaggaacagactcttccctttgcattcacaccagggaagggattcaagatttctgaaatcttcagagatttctg

SEQ ID NO: 109887 - DNA, 80 bp, synthetic construct
  source 1..80: mol_type = other DNA
ggaatgcattctgccatggaggagagcagccataagcagagctcatcaactgctcactttccagggggccataaccacat

SEQ ID NO: 109888 - DNA, 80 bp, synthetic construct; identical to SEQ ID NO: 21480
  source 1..80: mol_type = other DNA

SEQ ID NO: 109889 - DNA, 80 bp, synthetic construct
  source 1..80: mol_type = other DNA
taagtcatggcgggtgcgaacgggtctctgctgcaggcggctccgtgacagctcctgcttcacatgggtagaggagagac

SEQ ID NO: 109890 - DNA, 80 bp, synthetic construct
  source 1..80: mol_type = other DNA
gtagttgagttctcccagggagtgtgggaggaaaggttatgcccaccagagacccagggtcctgacggctggaggtccgc

SEQ ID NO: 109891 - DNA, 80 bp, synthetic construct
  source 1..80: mol_type = other DNA
gaggccaaatcccaggtctgcagagggtaaacagacggagtttatcatcaccgcggaaatactgagagtgagtgagctac

SEQ ID NO: 109892 - DNA, 80 bp, synthetic construct; identical to SEQ ID NO: 21481
  source 1..80: mol_type = other DNA

SEQ ID NO: 109893 - DNA, 80 bp, synthetic construct
  source 1..80: mol_type = other DNA
agatgttgatgaaagaaagcccatcttatagatgaggcctgagtatcatcatcttcacaggtaaggatatgtccaggtgt

SEQ ID NO: 109894 - DNA, 80 bp, synthetic construct
  source 1..80: mol_type = other DNA
tcctgagtagctgggactacagacacgtgccaccacacccatttaatttttgtatttttagtagagatggagtttcacta

SEQ ID NO: 109895 - DNA, 80 bp, synthetic construct
  source 1..80: mol_type = other DNA
tgtttgtgtctttgtcacacatgcctggcattgtgttttgcccatgagtaaatgctgaatttttgcacttgtaaagtttt

SEQ ID NO: 109896 - DNA, 80 bp, synthetic construct
  source 1..80: mol_type = other DNA
aaaccccgtctctactaaaaataccaaaaattagccggtcatagtggtgggcgcctgtaattccagctactcggggggct

SEQ ID NO: 109897 - DNA, 80 bp, synthetic construct; identical to SEQ ID NO: 21482
  source 1..80: mol_type = other DNA

SEQ ID NO: 109898 - DNA, 80 bp, synthetic construct
  source 1..80: mol_type = other DNA
ctgggattatagacgcccaccaccacgcccagcaaattttttgtatttttagtagagacagggtttcatcatgttgggca

SEQ ID NO: 109899 - DNA, 80 bp, synthetic construct
  source 1..80: mol_type = other DNA
gcggctcgtcaagtgaatcttgattccagaaagatctgttttaagtctctagtctggaaaatgcagtgggagtctttagg

SEQ ID NO: 109900 - DNA, 80 bp, synthetic construct
  source 1..80: mol_type = other DNA
gcagatttgtgaagtcgcaaaaaccaagaaatttgaagaggtaggtttatccagttgagctactagagagaggcacgtag

SEQ ID NO: 109901 - DNA, 80 bp, synthetic construct
  source 1..80: mol_type = other DNA
gttcaagcagttctcctgcctcagcctcctgagtagctgggattacaggcacgcgccaccacacccggctttttgtattt

SEQ ID NO: 109902 - DNA, 80 bp, synthetic construct; identical to SEQ ID NO: 21483
  source 1..80: mol_type = other DNA

SEQ ID NO: 109903 - DNA, 80 bp, synthetic construct
  source 1..80: mol_type = other DNA
cactctggccaacatggcgaaaccccgtctgtactaaaagatgatgagccgggcatggtggcacatgcctgtaatcccag

SEQ ID NO: 109904 - DNA, 80 bp, synthetic construct
  source 1..80: mol_type = other DNA
aaaaaaaggaagagtttgtagtggctgatagaaacgcatgctcactcgctctctcctgttacaagttcaggccaagaaaa

SEQ ID NO: 109905 - DNA, 80 bp, synthetic construct; identical to SEQ ID NO: 21484
  source 1..80: mol_type = other DNA

SEQ ID NO: 109906 - DNA, 80 bp, synthetic construct
  source 1..80: mol_type = other DNA
tctgaaacgtgctggccgtacgctaccaaagataggtgtaaagaacaggtgtccttagccgggcgcagtggttcacgcct

SEQ ID NO: 109907 - DNA, 80 bp, synthetic construct
  source 1..80: mol_type = other DNA
agggaggagaatcgcttaaactcaggaggcagaggttgtggtgagctgagattgtgccattgcactgcagcctgggcaac

SEQ ID NO: 109908 - DNA, 80 bp, synthetic construct
  source 1..80: mol_type = other DNA
tgcaacggtaagagtattgtcaatgagacaaaggaggtgagagtgccagttgtctgaattggttgggatgttggtcagat

SEQ ID NO: 109909 - DNA, 80 bp, synthetic construct
  source 1..80: mol_type = other DNA
gagtgccagttgtctgaattggttgggatgttggtcagatgacatctaaaagaacacggccattttgttattatttggtt

SEQ ID NO: 109910 - DNA, 80 bp, synthetic construct; identical to SEQ ID NO: 21485
  source 1..80: mol_type = other DNA

SEQ ID NO: 109911 - DNA, 80 bp, synthetic construct
  source 1..80: mol_type = other DNA
tggttaatgtggagaagggaaggtggtgagagccagcccaaacccctgccgagtgagactgattctggcagctttaggga

SEQ ID NO: 109912 - DNA, 80 bp, synthetic construct
  source 1..80: mol_type = other DNA
agcagggattctgggtcaggtgcaggcctagggcttagtgtgcacttgtggttctgagactgtcccatgacttcctgcca

SEQ ID NO: 109913 - DNA, 80 bp, synthetic construct
  source 1..80: mol_type = other DNA
cctgtggtcatctcaggctgcaggagacacaggagatacgagctttggaggtggggctctcagtcacaagcccccgttgt

SEQ ID NO: 109914 - DNA, 80 bp, synthetic construct
  source 1..80: mol_type = other DNA
ccggcacgcggtgctggctctgctgaaggccatcgtgcaggggcaggtaaggcccagggcgacgctgggatgggtgacgt

SEQ ID NO: 109915 - DNA, 80 bp, synthetic construct; identical to SEQ ID NO: 21486
  source 1..80: mol_type = other DNA

SEQ ID NO: 109916 - DNA, 80 bp, synthetic construct
  source 1..80: mol_type = other DNA
tctactccttcatgtcccagctgctcagaagggccgtccactctcacaggctctcctgggtttcccccactcaggccttg

SEQ ID NO: 109917 - DNA, 80 bp, synthetic construct
  source 1..80: mol_type = other DNA
cctgccctgtacaatgctgatgctgcagacctgtctcttgcagggcgcctctgtgggaaggagaggggtccagggctgga

SEQ ID NO: 109918 - DNA, 80 bp, synthetic construct; identical to SEQ ID NO: 21487
  source 1..80: mol_type = other DNA

SEQ ID NO: 109919 - DNA, 80 bp, synthetic construct
  source 1..80: mol_type = other DNA
tgcttcatgcacctgggctcacctgcgtggccggagtgcccctgaggcacgtgttaaaaatgcagagtcctggccttcac

SEQ ID NO: 109920 - DNA, 80 bp, synthetic construct
  source 1..80: mol_type = other DNA
accttcctcctgccatcctgtggtgggaggtttccattagtcttgggtctctgtgtcatgattctgggaagtagagaaag

SEQ ID NO: 109921 - DNA, 80 bp, synthetic construct
  source 1..80: mol_type = other DNA
ccgagccactctctgctgggggtggggaacgcccaggagtctggtgatgtcggcgtctcccagcctcgggttgggccctg

SEQ ID NO: 109922 - DNA, 80 bp, synthetic construct
  source 1..80: mol_type = other DNA
atgatggggtttctggcagtgacgggtttggacacactgtcctgcggcgggagggggaggtgagtgggagatgtagattc

SEQ ID NO: 109923 - DNA, 80 bp, synthetic construct; identical to SEQ ID NO: 21488
  source 1..80: mol_type = other DNA

SEQ ID NO: 109924 - DNA, 80 bp, synthetic construct
  source 1..80: mol_type = other DNA
ctaaaaatacaaaaattagccgggcatggtggtgggagcctgtaatcccagctactcaggaggctgaggcaggagaattg

SEQ ID NO: 109925 - DNA, 80 bp, synthetic construct
  source 1..80: mol_type = other DNA
cttctgtttagctctcatctgatgtcttggttatctttttgttgtttgtttagaatgttgcatgagctctgtctcactca

SEQ ID NO: 109926 - DNA, 80 bp, synthetic construct
  source 1..80: mol_type = other DNA
gccgggactgagctcggtgctccctgcaggatgatctgtctgctgtgcgtccggaccgcgtcctctgtggacatagaggt

SEQ ID NO: 109927 - DNA, 80 bp, synthetic construct; identical to SEQ ID NO: 21489
  source 1..80: mol_type = other DNA

SEQ ID NO: 109928 - DNA, 80 bp, synthetic construct
  source 1..80: mol_type = other DNA
tccctgcaggtgctggacgccgtggtctgctacaactgcctgccggctgagagcctcccgctgttcatcgttaccctctg

SEQ ID NO: 109929 - DNA, 80 bp, synthetic construct
  source 1..80: mol_type = other DNA
agggacggccagtgtcattttcccaggcagttgagctgaggtcagggttttggtggcattttgagaaccctgctgcctct

SEQ ID NO: 109930 - DNA, 80 bp, synthetic construct
  source 1..80: mol_type = other DNA
cccacctgggccacagcgccatctacaacatgtgccacctcatggaggacaggtgagtgtggtgggtggggcgcagggca

SEQ ID NO: 109931 - DNA, 80 bp, synthetic construct; identical to SEQ ID NO: 21490
  source 1..80: mol_type = other DNA

SEQ ID NO: 109932 - DNA, 80 bp, synthetic construct
  source 1..80: mol_type = other DNA
tcctgtatccatccgcgcctcctgaagcccactccatgcagcacccgggtggcctttttctgacacagatatgtcggtgt

SEQ ID NO: 109933 - DNA, 80 bp, synthetic construct
  source 1..80: mol_type = other DNA
cccagccctgcctcggcccctgcatctctcccagccctgcctcggcccctgcatctctcccagccctgcctcggcccctg

SEQ ID NO: 109934 - DNA, 80 bp, synthetic construct
  source 1..80: mol_type = other DNA
ccctgcctcagccctgcatctctcctagccctgcctcagcccctgcatctctccctccctcctcccgtagaaccaggccc

SEQ ID NO: 109935 - DNA, 80 bp, synthetic construct; identical to SEQ ID NO: 21491
  source 1..80: mol_type = other DNA

SEQ ID NO: 109936 - DNA, 80 bp, synthetic construct
  source 1..80: mol_type = other DNA
gagtgaacaagagtgttactgctggcctctgttccctgcccttccccagcggtgctcctgccccccccaagcacagggac

SEQ ID NO: 109937 - DNA, 80 bp, synthetic construct
  source 1..80: mol_type = other DNA
ctggggagcccaccggctctattctctcaggaactcgccgacatctgtgttgccatcattttaccaggtaaggcggtttc

SEQ ID NO: 109938 - DNA, 80 bp, synthetic construct; identical to SEQ ID NO: 21492
  source 1..80: mol_type = other DNA

SEQ ID NO: 109939 - DNA, 80 bp, synthetic construct
  source 1..80: mol_type = other DNA
ggattacaggcgtgagccaccatgcctggccaaaggcttttttctctctctctttttttttttttttttttttgagacag

SEQ ID NO: 109940 - DNA, 80 bp, synthetic construct
  source 1..80: mol_type = other DNA
tttttttaatgggacagagtttcgctcttattgcccaggctggagtgcaatggcgcgatcttggctcagcgcaacctccg

SEQ ID NO: 109941 - DNA, 80 bp, synthetic construct
  source 1..80: mol_type = other DNA
cctcagcctcccaaagtgctggaattataggtatgagtcaccgtgcccggccaaggctaatgttttgtatttttattaga

SEQ ID NO: 109942 - DNA, 80 bp, synthetic construct; identical to SEQ ID NO: 21493
  source 1..80: mol_type = other DNA

SEQ ID NO: 109943 - DNA, 80 bp, synthetic construct
  source 1..80: mol_type = other DNA
atagtgatgagctgcggtgtgggtcacagggctctcctgatcctctgctcttcctgctacccccctccccgtaggggcgg

SEQ ID NO: 109944 - DNA, 80 bp, synthetic construct
  source 1..80: mol_type = other DNA
tgtgctggagcatgtagaaacccctcctgggcgccccacctgctgtttctgcggcccctgataaacgtgtggtgggcact

SEQ ID NO: 109945 - DNA, 80 bp, synthetic construct
  source 1..80: mol_type = other DNA
ctcatcaagaagtataggaaggagctccaggtggtggcgtgggacattctgctgaacatcatcgaacggctccttcagca

SEQ ID NO: 109946 - DNA, 80 bp, synthetic construct; identical to SEQ ID NO: 21494
  source 1..80: mol_type = other DNA

SEQ ID NO: 109947 - DNA, 80 bp, synthetic construct
  source 1..80: mol_type = other DNA
gactccacggccacacgggctcatcagcataggggccctggggaggcgaggctagtatccagcagcctcagggctgtgcc

SEQ ID NO: 109948 - DNA, 80 bp, synthetic construct
  source 1..80: mol_type = other DNA
tggggcttctaaaagaggctggacctgggagaggcaagaaaggcttgtagttgtggctactcttggccctcctgcccgag

SEQ ID NO: 109949 - DNA, 80 bp, synthetic construct
  source 1..80: mol_type = other DNA
gggtgtctcaacccatgaggcccggagcggcctcagagggctgggggcgtctgtccccatgcggcccagagcggcctgag

SEQ ID NO: 109950 - DNA, 80 bp, synthetic construct; identical to SEQ ID NO: 21495
  source 1..80: mol_type = other DNA

SEQ ID NO: 109951 - DNA, 80 bp, synthetic construct
  source 1..80: mol_type = other DNA
acgtgtttggtaacaagctcggggctagcccacccatcagtttcctcccacctgtgtggagcaagcttccatccggctct

SEQ ID NO: 109952 - DNA, 80 bp, synthetic construct
  source 1..80: mol_type = other DNA
acagcaaaccagcctctcgaccagcagcccagtgtggagaaggagagcgccggaggggcagaggggcaacaccggctctt

SEQ ID NO: 109953 - DNA, 80 bp, synthetic construct
  source 1..80: mol_type = other DNA
ggtcctctgtagccttgcctggcacctggagcctggccctgtctctgtctggggcccacccgggctgggtctcaggatgc

SEQ ID NO: 109954 - DNA, 80 bp, synthetic construct
  source 1..80: mol_type = other DNA
tctgtgccctgtgtgcctggccgcgggaggacccagagtcgggctggcctgcgccaggcagacgggctggtgtggggctg

SEQ ID NO: 109955 - DNA, 80 bp, synthetic construct; identical to SEQ ID NO: 21496
  source 1..80: mol_type = other DNA

SEQ ID NO: 109956 - DNA, 80 bp, synthetic construct
  source 1..80: mol_type = other DNA
gagcctcttaaaaattctgtgtgagttcgtttcagccagtcttgcatggggacattgtcttccgtttcagtcctgacgtt

SEQ ID NO: 109957 - DNA, 80 bp, synthetic construct
  source 1..80: mol_type = other DNA
taggctctgaggctgtcccttcccaccgaactcctccctgcagcctcgcagtcctgccctcctgagagctgcccactctg

SEQ ID NO: 109958 - DNA, 80 bp, synthetic construct; identical to SEQ ID NO: 21497
  source 1..80: mol_type = other DNA

SEQ ID NO: 109959 - DNA, 80 bp, synthetic construct
  source 1..80: mol_type = other DNA
gcggtgctcaccagccttctgaacgaggagctggacaggatccctggaaggggccccggggtctctgagtcgcgctcagc

SEQ ID NO: 109960 - DNA, 80 bp, synthetic construct
  source 1..80: mol_type = other DNA
tcagtggtcatctcgcagctctcccacatccccgaggataaagaccaccaggtccgaaagctggccacccagttgctggt

SEQ ID NO: 109961 - DNA, 80 bp, synthetic construct
  source 1..80: mol_type = other DNA
ggctgtgtccgtaggtgaggctcccctccctgcagggtgggtgtcccgaggcctgtgcagggcctgccactgctggattt

SEQ ID NO: 109962 - DNA, 80 bp, synthetic construct; identical to SEQ ID NO: 21498
  source 1..80: mol_type = other DNA

SEQ ID NO: 109963 - DNA, 80 bp, synthetic construct
  source 1..80: mol_type = other DNA
aggaggctgaggcaggagaatcgcttgaacctaggaggtgaaggttgcagtgagccaagattctgccactgcactccagc

SEQ ID NO: 109964 - DNA, 80 bp, synthetic construct
  source 1..80: mol_type = other DNA
actaaaaatacaaaaaattagctgggcgtggtggcgggcgcctgtagtcctagctactggggaggctgaggcaggagaat

SEQ ID NO: 109965 - DNA, 80 bp, synthetic construct
  source 1..80: mol_type = other DNA
cctgtgtgtaagtcctggccttctcttcaaaggtgatggcccgctccctctccccacccccggagctggaagaaagggat

SEQ ID NO: 109966 - DNA, 80 bp, synthetic construct
  source 1..80: mol_type = other DNA
cgggacccacaccctccctggatttgctgagggtgcggtggtctcagcaggcagcagaaccttcctcctgctcttgtgga

SEQ ID NO: 109967 - DNA, 80 bp, synthetic construct; identical to SEQ ID NO: 21499
  source 1..80: mol_type = other DNA

SEQ ID NO: 109968 - DNA, 80 bp, synthetic construct
  source 1..80: mol_type = other DNA
atttcatggaagtggaatcacacaaaattcatccataagatgttggatggtagaacagtttcctgtctgctgactggatt

SEQ ID NO: 109969 - DNA, 80 bp, synthetic construct
  source 1..80: mol_type = other DNA
ctccgccgggcctgcattttcacttttgggtctgcacctaggagtgaattgttgggccctaggtttagtctgcatttggt

SEQ ID NO: 109970 - DNA, 80 bp, synthetic construct; identical to SEQ ID NO: 21500
  source 1..80: mol_type = other DNA

SEQ ID NO: 109971 - DNA, 80 bp, synthetic construct
  source 1..80: mol_type = other DNA
ctacttttcaaagcctcacagcatcacttacgtgtgactgtcagtgtcagtatcgtgtaaaatataatgtatgaatcagt

SEQ ID NO: 109972 - DNA, 80 bp, synthetic construct
  source 1..80: mol_type = other DNA
ttaattttttgagacaagatctcactctgtcgcccaggctggggtgcagtgctgtgaccatagctcagtgcagccttgaa

SEQ ID NO: 109973 - DNA, 80 bp, synthetic construct
  source 1..80: mol_type = other DNA
ccaccatagcctcccaaagtgctgggattacaggcatgagccaccacacctggccgtggtgtttgattaaaaaccaggca

SEQ ID NO: 109974 - DNA, 80 bp, synthetic construct
  source 1..80: mol_type = other DNA
gtagtcccagctactcgggaggctgaggcaggagaatcacttgaacccatgaggcagagggtacagtaagcccagatcac

SEQ ID NO: 109975 - DNA, 80 bp, synthetic construct; identical to SEQ ID NO: 21501
  source 1..80: mol_type = other DNA

SEQ ID NO: 109976 - DNA, 80 bp, synthetic construct
  source 1..80: mol_type = other DNA
cctcccaggttcaagcaattctcttgcctcagcctcctgagtagctgagatgacaggtgcgcaccaccacacctggctaa

SEQ ID NO: 109977 - DNA, 80 bp, synthetic construct
  source 1..80: mol_type = other DNA
atcgtgcctggcctgttttcatttcttttgttataattgaaaagtaacacagttgactcttgaacagtatggggctggga

SEQ ID NO: 109978 - DNA, 80 bp, synthetic construct; identical to SEQ ID NO: 21502
  source 1..80: mol_type = other DNA

SEQ ID NO: 109979 - DNA, 80 bp, synthetic construct
  source 1..80: mol_type = other DNA
gctggatgcggtggtgcgcacctgtaatcccagctactcgggaggctgaggtaggagaatcacttgaacctgggaggtgg

SEQ ID NO: 109980 - DNA, 80 bp, synthetic construct
  source 1..80: mol_type = other DNA
atcctcatgttgaggggactgaggaggaaggagaggagacacatggtcttgctctctcgggtgggagaggcggaagaaaa

SEQ ID NO: 109981 - DNA, 80 bp, synthetic construct
  source 1..80: mol_type = other DNA
ggggggtgccaggcactgtgtgaacccccacctccacctcttttttgtccgaggaagggatgttgcttttatgtcataat

SEQ ID NO: 109982 - DNA, 80 bp, synthetic construct; identical to SEQ ID NO: 21503
  source 1..80: mol_type = other DNA

SEQ ID NO: 109983 - DNA, 80 bp, synthetic construct
  source 1..80: mol_type = other DNA
agccaggatggtcttgatctcctgacctcatgatccacccgcctcggcttcccaaagtgctgggattacaggcgtgagcc

SEQ ID NO: 109984 - DNA, 80 bp, synthetic construct
  source 1..80: mol_type = other DNA
caatgattttttaatcatttaaaggtgttaatcatttctttaaaagaataacagtgtaaccacttacctccagagtgctg

SEQ ID NO: 109985 - DNA, 80 bp, synthetic construct
  source 1..80: mol_type = other DNA
cactccccgccccattctgccctgtctgccacgcagctggagcttctccattgaatggactcttcctcacctgttgatga

SEQ ID NO: 109986 - DNA, 80 bp, synthetic construct; identical to SEQ ID NO: 21504
  source 1..80: mol_type = other DNA

SEQ ID NO: 109987 - DNA, 80 bp, synthetic construct
  source 1..80: mol_type = other DNA
ggttcctggaagctgcagagacggccccaggatggggcctcagctgaccgtccctcctctgcacccactgtggccgcagc

SEQ ID NO: 109988 - DNA, 80 bp, synthetic construct
  source 1..80: mol_type = other DNA
gtgcatggccctgacgctcctggtgctgcagaatctgtgaaggacctgcagcagagggctgggcaggtgggcggcacagg

SEQ ID NO: 109989 - DNA, 80 bp, synthetic construct
  source 1..80: mol_type = other DNA
cctccctcctagagcaggtgctctctggggccacccctgtggcctcagagtcctgttcagcctgtcgatggaagaagtgg

SEQ ID NO: 109990 - DNA, 80 bp, synthetic construct; identical to SEQ ID NO: 21505
  source 1..80: mol_type = other DNA

SEQ ID NO: 109991 - DNA, 80 bp, synthetic construct
  source 1..80: mol_type = other DNA
aacaaggatggagtcgtgcggttcagcccctactgcgtctgcgactacatgtacgcgggacctcgcccacggcccatgag

SEQ ID NO: 109992 - DNA, 80 bp, synthetic construct
  source 1..80: mol_type = other DNA
agaagaccagcggccccctttctcctcccacagggcctcctggcccggcgcctgcaggccccgccgtgcggctggggtcc

SEQ ID NO: 109993 - DNA, 80 bp, synthetic construct
  source 1..80: mol_type = other DNA
ctcagagctgagccttcccccttccccgagcagctgcagggacagaggcctgcgctgggcaggctcccccggctgagaac

SEQ ID NO: 109994 - DNA, 80 bp, synthetic construct; identical to SEQ ID NO: 21506
  source 1..80: mol_type = other DNA

SEQ ID NO: 109995 - DNA, 80 bp, synthetic construct
  source 1..80: mol_type = other DNA
gggacccctgccccagctcgcagcttttgggactgacgtcagaggtccccagccaagggcatgtcactgaatgtggatgt

SEQ ID NO: 109996 - DNA, 80 bp, synthetic construct
  source 1..80: mol_type = other DNA
aaggctccccagcccctttgccccctttcctgggcctgcgttcccagggcctccccagcccctctggctaccccgtgacc

SEQ ID NO: 109997 - DNA, 80 bp, synthetic construct
  source 1..80: mol_type = other DNA
gttccagtgctgacagcattaatctcttaccataactacctggacaaaaccaaacaggtaggaggtcagagcaggacagg

SEQ ID NO: 109998 - DNA, 80 bp, synthetic construct
  source 1..80: mol_type = other DNA
tagctctctttggggcctgggagccatccagtgttccctgtccaccccggacagcatctctgctctctgtagagcgttgc

SEQ ID NO: 109999 - DNA, 80 bp, synthetic construct; identical to SEQ ID NO: 21507
  source 1..80: mol_type = other DNA

SEQ ID NO: 110000 - DNA, 80 bp, synthetic construct
  source 1..80: mol_type = other DNA
tgagaggctcactgggtcctcatgggtcttgcctcaaagcatagccagccttgctgggctgcaggttctgaggccttact

SEQ ID NO: 110001 - DNA, 80 bp, synthetic construct
  source 1..80: mol_type = other DNA
ggcttggccacttcaggcagcactgccccttgcaacagagccagcctgtgaagggcccagaaccaggggatgagagccca

SEQ ID NO: 110002 - DNA, 80 bp, synthetic construct
  source 1..80: mol_type = other DNA
gaggttggcgaggggtaggcgaggctgcctctgctgcaagcgggtggggcctgaggtgtcctgtctcctgcagcgcgaga

SEQ ID NO: 110003 - DNA, 80 bp, synthetic construct; identical to SEQ ID NO: 21508
  source 1..80: mol_type = other DNA

SEQ ID NO: 110004 - DNA, 80 bp, synthetic construct
  source 1..80: mol_type = other DNA
ctcctccttgaagaagcctcttcccccccgagcagtggccctcccctggttttgggcctcctctctgtccaacagagcac

SEQ ID NO: 110005 - DNA, 80 bp, synthetic construct
  source 1..80: mol_type = other DNA
gagaagatcgtgtgtgctttgtgggccacatgcaggtcctgtcggtctttctgttttgttgataaccctttagaagtgta

SEQ ID NO: 110006 - DNA, 80 bp, synthetic construct; identical to SEQ ID NO: 21509
  source 1..80: mol_type = other DNA

SEQ ID NO: 110007 - DNA, 80 bp, synthetic construct
  source 1..80: mol_type = other DNA
accatctggcgaacacggtgaaaccccgtctctaataaaaatacaaaaaaactagccaggcgtggtggcgggcgcctgta

SEQ ID NO: 110008 - DNA, 80 bp, synthetic construct
  source 1..80: mol_type = other DNA
tcctcacggatcacacaaatggtaggcgacagctcgaattggcccagaagctgtggttggctggccatgggaccgagagt

SEQ ID NO: 110009 - DNA, 80 bp, synthetic construct
  source 1..80: mol_type = other DNA
aggctgccgcacctctacaggaactttgccgcggagcagtatgccagtgtgttcgccatctccctgccgtacaccaaccc

SEQ ID NO: 110010 - DNA, 80 bp, synthetic construct; identical to SEQ ID NO: 21510
  source 1..80: mol_type = other DNA

SEQ ID NO: 110011 - DNA, 80 bp, synthetic construct
  source 1..80: mol_type = other DNA
cagagtgacaggcaggtggagggcagtgggagggtgtttggggctgtgcctgtggcgctgggggctctgctgggcagcct

SEQ ID NO: 110012 - DNA, 80 bp, synthetic construct
  source 1..80: mol_type = other DNA
ccagggcctgcggtccaatgtcctcttgtcttttgatgacacccccgagaaggacagcttcagggcccggagtactagtc

SEQ ID NO: 110013 - DNA, 80 bp, synthetic construct
  source 1..80: mol_type = other DNA
caagggccgctaacacccctcagcccctcagcaggttggccgtggtggcctgggtccgggctgcgtgtgccacgggcacc

SEQ ID NO: 110014 - DNA, 80 bp, synthetic construct; identical to SEQ ID NO: 21511
  source 1..80: mol_type = other DNA

SEQ ID NO: 110015 - DNA, 80 bp, synthetic construct
  source 1..80: mol_type = other DNA
ggtcttggtctcttttcctagtgaccttcagggcctggccactgaggcctcagtgccgcctcggtcagagctgggcggtg

SEQ ID NO: 110016 - DNA, 80 bp, synthetic construct
  source 1..80: mol_type = other DNA
ttacttgttctcagtcatgtttaccagacgtattatcatgcatttttgttttctgtctcttccccgctaactgccctttg

SEQ ID NO: 110017 - DNA, 80 bp, synthetic construct
  source 1..80: mol_type = other DNA
agccagaccccccaaacaaggcttgaataactctccacccgtgaaagaattcaaggagagctctgcagccgaggccttcc

SEQ ID NO: 110018 - DNA, 80 bp, synthetic construct
  source 1..80: mol_type = other DNA
tgcatgacctcatcgtctgcccgtgtcctccctggccagcccagggggagccggtgacgaggggtggaaaggttgcattc

SEQ ID NO: 110019 - DNA, 80 bp, synthetic construct; identical to SEQ ID NO: 21512
  source 1..80: mol_type = other DNA

SEQ ID NO: 110020 - DNA, 80 bp, synthetic construct
  source 1..80: mol_type = other DNA
tgtcacctgcctgtgggtcatcgctgctggcactggcagaggggatacctgtctcctcctggaagcccgttgcaggccaa

SEQ ID NO: 110021 - DNA, 80 bp, synthetic construct
  source 1..80: mol_type = other DNA
acattctgtatcatgagcaaaatattgcctaggggctatgaaatttgtatcagaatgaactcccataagcctcttccctg

SEQ ID NO: 110022 - DNA, 80 bp, synthetic construct; identical to SEQ ID NO: 21513
  source 1..80: mol_type = other DNA

SEQ ID NO: 110023 - DNA, 80 bp, synthetic construct
  source 1..80: mol_type = other DNA
tggtgataggtggctcggcccgccctacctggcaccctgaccctggtcacggcctctccctccagcaggatacagacgtc

SEQ ID NO: 110024 - DNA, 80 bp, synthetic construct
  source 1..80: mol_type = other DNA
cactacagggctgggcgggcctgcgggagctccacgggcaagctgggtttcacgctccctgtcttctaggtctcctgtgg

SEQ ID NO: 110025 - DNA, 80 bp, synthetic construct
  source 1..80: mol_type = other DNA
cctccgcgcctgccagcctcgacaccggctgtcccgagcccaggcccacgtggcaccctcgtaccagcctggggactaag

SEQ ID NO: 110026 - DNA, 80 bp, synthetic construct
  source 1..80: mol_type = other DNA
ccacctccacacaggcaccggggctccctcagttgctgctggtcccagtgttcaggaaggccccgagcccaggggccggg

SEQ ID NO: 110027 - DNA, 80 bp, synthetic construct; identical to SEQ ID NO: 21514
  source 1..80: mol_type = other DNA

SEQ ID NO: 110028 - DNA, 80 bp, synthetic construct
  source 1..80: mol_type = other DNA
ggccatggtcttcgagttggcgccctggacgtgccggcctcccagttcctgggcagtgccacttctccaggaccacggac

SEQ ID NO: 110029 - DNA, 80 bp, synthetic construct
  source 1..80: mol_type = other DNA
ctttctgccagtcacccacagagctgtggacactcaggggcgattgcagacttggccctcttgggatatttgggggtaac

SEQ ID NO: 110030 - DNA, 80 bp, synthetic construct
  source 1..80: mol_type = other DNA
ccaatttttttgtatttctagtagagatggggtttcactgtgttagccaggatggtctcaatctcctgacctcgtgatcc

SEQ ID NO: 110031 - DNA, 80 bp, synthetic construct; identical to SEQ ID NO: 21515
  source 1..80: mol_type = other DNA

SEQ ID NO: 110032 - DNA, 80 bp, synthetic construct
  source 1..80: mol_type = other DNA
ctagccgtaattagctttctgaaacccagtctccagagacagtcccgttctgagttcctggggttgggactaaagcatac

SEQ ID NO: 110033 - DNA, 80 bp, synthetic construct
  source 1..80: mol_type = other DNA
gtggaggccttgggtccggactgtgaggctgtgggctggaggccgctgctctgaggtgcctggcggagcctggcctcgag

SEQ ID NO: 110034 - DNA, 80 bp, synthetic construct; identical to SEQ ID NO: 21516
  source 1..80: mol_type = other DNA

SEQ ID NO: 110035 - DNA, 80 bp, synthetic construct
  source 1..80: mol_type = other DNA
catggcgggccttggcacgggctctgctcccactggcctggtgctcccggtgacggcaatgtggctcctctctgctgagg

SEQ ID NO: 110036 - DNA, 80 bp, synthetic construct
  source 1..80: mol_type = other DNA
ctccgtggggagtccagcactgcgggctccaggaggctctgcggcagcctccctccctgcctgggcccaggtttggacac

SEQ ID NO: 110037 - DNA, 80 bp, synthetic construct
  source 1..80: mol_type = other DNA
cttgtagctagcactgggccccgtgcgcgcccctgccggccgctggccctgccctctctcctctgcaggcacggggcctg

SEQ ID NO: 110038 - DNA, 80 bp, synthetic construct
  source 1..80: mol_type = other DNA
ggttggctgcagagcgccactctgcctcataggtgctgtgctcgtcgcctcatccgcccacccccatggtccgtctgcct

SEQ ID NO: 110039 - DNA, 80 bp, synthetic construct; identical to SEQ ID NO: 21517
  source 1..80: mol_type = other DNA

SEQ ID NO: 110040 - DNA, 80 bp, synthetic construct
  source 1..80: mol_type = other DNA
tggtgctcccctgccaggtctccacgtgcagacgagctggtttggaagggctgcgtgggacgggccctggggtggctgac

SEQ ID NO: 110041 - DNA, 80 bp, synthetic construct
  source 1..80: mol_type = other DNA
gttggagggtgagcctctgctcttgggagcagtctgtttgcaaacagggacttcccccacgtcacggagtctccgcagct

SEQ ID NO: 110042 - DNA, 80 bp, synthetic construct; identical to SEQ ID NO: 21518
  source 1..80: mol_type = other DNA

SEQ ID NO: 110043 - DNA, 80 bp, synthetic construct
  source 1..80: mol_type = other DNA
ggcgaggttcctgtgctggtggagcccccagggttggaggacgttgaggcagcgctaggcatggacaggcgcacggatgc

SEQ ID NO: 110044 - DNA, 80 bp, synthetic construct
  source 1..80: mol_type = other DNA
tttgcagccatccacctgggccggccctggctgctgggcagcctgtggtctcaggggatgctgatacctctgctcacgca

SEQ ID NO: 110045 - DNA, 80 bp, synthetic construct
  source 1..80: mol_type = other DNA
ctttgggatggtcctttctagtcgtcctcagtctccagccaggaggagaagtcgctccacgcggaggagctggttggcag

SEQ ID NO: 110046 - DNA, 80 bp, synthetic construct
  source 1..80: mol_type = other DNA
cggctgagccctgaggttaaggcccggtcacagtcagggaccctggacggggaaagtgctgcctggtcggcctcgggcga

SEQ ID NO: 110047 - DNA, 80 bp, synthetic construct; identical to SEQ ID NO: 21519
  source 1..80: mol_type = other DNA

SEQ ID NO: 110048 - DNA, 80 bp, synthetic construct
  source 1..80: mol_type = other DNA
gcccaccatcccctccctgtgcagtttcgtgttcctgcagctctaccattcccccttctttggcgacgagtcaaacaagc

SEQ ID NO: 110049 - DNA, 80 bp, synthetic construct
  source 1..80: mol_type = other DNA
ctgggtggggcggcctcctgtggacgggcgtctggggctcaggcagggctctgtgtgccacagtcacagtcctttgagcg

SEQ ID NO: 110050 - DNA, 80 bp, synthetic construct; identical to SEQ ID NO: 21520
  source 1..80: mol_type = other DNA

SEQ ID NO: 110051 - DNA, 80 bp, synthetic construct
  source 1..80: mol_type = other DNA
tgacagctgagtggtgagggagcgggcagggggagcctgcataaggggtgggggcatcccacacaccagcagcgggggcc

SEQ ID NO: 110052 - DNA, 80 bp, synthetic construct
  source 1..80: mol_type = other DNA
tcagtgagtccctcctgctgtgtggctcgaggaggtgggtggtgatggttcccgtgggagtggggtaggcccctgggggc

SEQ ID NO: 110053 - DNA, 80 bp, synthetic construct
  source 1..80: mol_type = other DNA
ggatcagagtggggctcccggcagagcctgctgggcacccccaccctctgcggggcagggcccggcccgggagtgatgcc

SEQ ID NO: 110054 - DNA, 80 bp, synthetic construct; identical to SEQ ID NO: 21521
  source 1..80: mol_type = other DNA

SEQ ID NO: 110055 - DNA, 80 bp, synthetic construct
  source 1..80: mol_type = other DNA
aaagccctgcccctggggagagccgaggaccactggccaggcaccagaggacgtggtccccgcaggcccccagagcccct

SEQ ID NO: 110056 - DNA, 80 bp, synthetic construct
  source 1..80: mol_type = other DNA
gcaacgactttgtgtccattgtctacaatgactccggtgaggacttcaagcttggcaccatcaaggtgagtgaggggccg

SEQ ID NO: 110057 - DNA, 80 bp, synthetic construct
  source 1..80: mol_type = other DNA
gccctgaagcctgtggcgcctgctgctgagtgtctgtcaggagtaactggcaagtgcagactgggtgtgctgggtgggca

SEQ ID NO: 110058 - DNA, 80 bp, synthetic construct
  source 1..80: mol_type = other DNA
cagcacggtccgggtgagccccagcatggcggggagagctggcatggcccaggcagggcagataggctggaggcctcact

SEQ ID NO: 110059 - DNA, 80 bp, synthetic construct; identical to SEQ ID NO: 21522
  source 1..80: mol_type = other DNA

SEQ ID NO: 110060 - DNA, 80 bp, synthetic construct
  source 1..80: mol_type = other DNA
agctgacaggtgtctagcagtgcaaccaggcagtagccgagatcagccttcagcacacgctgtgtgcggggatgaccctt

SEQ ID NO: 110061 - DNA, 80 bp, synthetic construct
  source 1..80: mol_type = other DNA
ccaagagccctgggcctggcgtgaccaccaagtctccccagacatggagggccttgtggacaccagcgtggccaagatcg

SEQ ID NO: 110062 - DNA, 80 bp, synthetic construct
  source 1..80: mol_type = other DNA
tagccgctccaaccccaccgatatctacccctccaagtggattgcccggctccgccacatcaagcggctccgccagcggg

SEQ ID NO: 110063 - DNA, 80 bp, synthetic construct; identical to SEQ ID NO: 21523
  source 1..80: mol_type = other DNA

SEQ ID NO: 110064 - DNA, 80 bp, synthetic construct
  source 1..80: mol_type = other DNA
ttattgactttgtctgcttggtgcgggggttgggggggtgtcgaggctctagaagcggccatgcccacagaagtggtaca

SEQ ID NO: 110065 - DNA, 80 bp, synthetic construct
  source 1..80: mol_type = other DNA
tctgacatgcctagtcctgctacttgcccagacctgatgccagcaggcctgggcgctgctctcttgctacctggcctggg

SEQ ID NO: 110066 - DNA, 80 bp, synthetic construct; identical to SEQ ID NO: 21524
  source 1..80: mol_type = other DNA

SEQ ID NO: 110067 - DNA, 80 bp, synthetic construct
  source 1..80: mol_type = other DNA
gacatctgcccagggggtggggccgggcacagcccgctgtacctgaggactcggggaaataaattagcatctcagaggct

SEQ ID NO: 110068 - DNA, 80 bp, synthetic construct; identical to SEQ ID NO: 21525
  source 1..80: mol_type = other DNA

SEQ ID NO: 110069 - DNA, 80 bp, synthetic construct
  source 1..80: mol_type = other DNA
gttggcactgctctggcataggaatacttgaatagcttggttaaatgaagggatggccaggagatgttacttttccaagc

SEQ ID NO: 110070 - DNA, 80 bp, synthetic construct
  source 1..80: mol_type = other DNA
atcaccaatgccttacatttctgattcagtaggtattggtgcacatatcaagtgatatgcacagcatcattctcttttag

SEQ ID NO: 110071 - DNA, 80 bp, synthetic construct
  source 1..80: mol_type = other DNA
aaatgtcataaaataaatggtacaaaactttataaccgttaatccggctatatacagtatgtacatgtcactagcaaatg

SEQ ID NO: 110072 - DNA, 80 bp, synthetic construct; identical to SEQ ID NO: 21526
  source 1..80: mol_type = other DNA

SEQ ID NO: 110073 - DNA, 80 bp, synthetic construct
  source 1..80: mol_type = other DNA
aaagcacaggctactgttagaactttgccttcatcaatgctgatatcagatggaagagcttcaattttaggcggaattcc

SEQ ID NO: 110074 - DNA, 80 bp, synthetic construct
  source 1..80: mol_type = other DNA
ttactagttgagctttccagttgtgtcatattagatattcccataaagctgctggaactcatttctacaaaggactcttg

SEQ ID NO: 110075 - DNA, 80 bp, synthetic construct
  source 1..80: mol_type = other DNA
gttctcaatactacctctctggaaggttcttcaactagagctgtggagcatagcagatacacagtgaacatcaatgacat

SEQ ID NO: 110076 - DNA, 80 bp, synthetic construct
  source 1..80: mol_type = other DNA
gtcaagagctagctcaatgtctccaaaacatgaatccttatatttctatcattacattacatgcaggtgctaggaatcac

SEQ ID NO: 110077 - DNA, 80 bp, synthetic construct; identical to SEQ ID NO: 21527
  source 1..80: mol_type = other DNA

SEQ ID NO: 110078 - DNA, 80 bp, synthetic construct
  source 1..80: mol_type = other DNA
cgctgactgatgcatttcggatttcaagggagtatacatttctggagcggcttatgctgacatttgaagaaatagaaatc

SEQ ID NO: 110079 - DNA, 80 bp, synthetic construct
  source 1..80: mol_type = other DNA
aagagaacattttgtccttcattaatattttgagatctaggctgtgagatgaaggctggagcatctgagagttctttgct

SEQ ID NO: 110080 - DNA, 80 bp, synthetic construct; identical to SEQ ID NO: 21528
  source 1..80: mol_type = other DNA

SEQ ID NO: 110081 - DNA, 80 bp, synthetic construct
  source 1..80: mol_type = other DNA
ttcagaaatcagaacctttgaagcttcctctttgagggctaacttttcttgagattttgcctctgacatcttaatttctt

SEQ ID NO: 110082 - DNA, 80 bp, synthetic construct
  source 1..80: mol_type = other DNA
aaacctctgtaaggcaaacttaattagaaagagacccccaccttttactcttctagattctgcgtgtgaaaaacataaaa

SEQ ID NO: 110083 - DNA, 80 bp, synthetic construct
  source 1..80: mol_type = other DNA
gagccaaagatgattcatatgacttaaggaaaaaagtcttgaaaagaatagtcaacggatttaggagataagtggatttg

SEQ ID NO: 110084 - DNA, 80 bp, synthetic construct; identical to SEQ ID NO: 21529
  source 1..80: mol_type = other DNA

SEQ ID NO: 110085 - DNA, 80 bp, synthetic construct
  source 1..80: mol_type = other DNA
tcttgtatgtgtatataaggggggatgtttgaaaatatttccctaatattatcttctgaagaaatgtgggtaaaaacaaa

SEQ ID NO: 110086 - DNA, 80 bp, synthetic construct
  source 1..80: mol_type = other DNA
ccctcccttgtcttcagagagtttatatttacctccttgtgtaatggcctgtagaatgcaaatgatttgtgttttaaaaa

SEQ ID NO: 110087 - DNA, 80 bp, synthetic construct
  source 1..80: mol_type = other DNA
cactgtctgaagaaacagttgtatcctgcaacccagtaacaattactggttttgaggaaattggttcaggagcttttggt

SEQ ID NO: 110088 - DNA, 80 bp, synthetic construct
  source 1..80: mol_type = other DNA
ttagacgttccaccttcaccagaaatctcacaaacatattctccttgatcagattcagtgaggttattgattttgagctc

SEQ ID NO: 110089 - DNA, 80 bp, synthetic construct; identical to SEQ ID NO: 21530
  source 1..80: mol_type = other DNA

SEQ ID NO: 110090 - DNA, 80 bp, synthetic construct
  source 1..80: mol_type = other DNA
cctggccttttgaatagtcagagtgaactctgcttcttgtttcccttcactgttttctaccaccacgctgtaattgccct

SEQ ID NO: 110091 - DNA, 80 bp, synthetic construct
  source 1..80: mol_type = other DNA
ctcgtagacggtcatggaccgtggctttgttagaattcttgctgccaaagtcgtcttgatctttctggttgtggattttt

SEQ ID NO: 110092 - DNA, 80 bp, synthetic construct; identical to SEQ ID NO: 21531
  source 1..80: mol_type = other DNA

SEQ ID NO: 110093 - DNA, 80 bp, synthetic construct
  source 1..80: mol_type = other DNA
ctccactcgtgttggtgtaatgaatcttactgctttcttggagttccacaccattgtggtaccatttaacctcggcagtt

SEQ ID NO: 110094 - DNA, 80 bp, synthetic construct
  source 1..80: mol_type = other DNA
ctttcatggactcatacctggaaaagatatcaaatcttgcagacctctcaaatctcgagagtgatctctcactagacaca

SEQ ID NO: 110095 - DNA, 80 bp, synthetic construct
  source 1..80: mol_type = other DNA
gtctagacgcagatgaggatgattctctttgagcatgttttgagatttcgtattcttcctcaatttctgttatttctgtc

SEQ ID NO: 110096 - DNA, 80 bp, synthetic construct; identical to SEQ ID NO: 21532
  source 1..80: mol_type = other DNA

SEQ ID NO: 110097 - DNA, 80 bp, synthetic construct
  source 1..80: mol_type = other DNA
ttcttttcattgctaagtagtcatcaatggggaggagtaattcttcatcagagatgtccccaagagaacgtcttctaggt

SEQ ID NO: 110098 - DNA, 80 bp, synthetic construct
  source 1..80: mol_type = other DNA
ggatgcgcttgggtcgtttctgtacaactctgtcaagtttcccaggcatttcatactgatcacgtatctttttataccac

SEQ ID NO: 110099 - DNA, 80 bp, synthetic construct
  source 1..80: mol_type = other DNA
tgcttacagccggtttataaaggacagcagcttctctcagagcctctttagctacctgtgtcagtggtacactttcagtt

SEQ ID NO: 110100 - DNA, 80 bp, synthetic construct; identical to SEQ ID NO: 21533
  source 1..80: mol_type = other DNA

SEQ ID NO: 110101 - DNA, 80 bp, synthetic construct
  source 1..80: mol_type = other DNA
agtaaccttttgaacatgggtcttaaggtactatctgttggaggtgggtgtagggttactgtcagctttgctttacagct

SEQ ID NO: 110102 - DNA, 80 bp, synthetic construct
  source 1..80: mol_type = other DNA
acatgaggctctgggtggacagttatagttactccaaaccggacattttcacctacataagctgtcttattatagagagg

SEQ ID NO: 110103 - DNA, 80 bp, synthetic construct
  source 1..80: mol_type = other DNA
catctgtaggtaccatcatctaatttggtaatgtctttgacatagaggatggccactccatcttcgtaggtgatttcgta

SEQ ID NO: 110104 - DNA, 80 bp, synthetic construct
  source 1..80: mol_type = other DNA
tatctgcccagaaactgggccaatttcaatggatgccactttaactttagcaacactcactcccttctgagatcgaattg

SEQ ID NO: 110105 - DNA, 80 bp, synthetic construct; identical to SEQ ID NO: 21534
  source 1..80: mol_type = other DNA

SEQ ID NO: 110106 - DNA, 80 bp, synthetic construct
  source 1..80: mol_type = other DNA
atagtattctggggcagtgaatagaagcctgaagttgtcccctggtttcagctgacgggcttgaccaaattctatgattt

SEQ ID NO: 110107 - DNA, 80 bp, synthetic construct
  source 1..80: mol_type = other DNA
aactgaagtgcttcacagacctggtgaacataacttacaatttctctttcattaagttcaaaagcacttgtgttaatgcg

SEQ ID NO: 110108 - DNA, 80 bp, synthetic construct; identical to SEQ ID NO: 21535
  source 1..80: mol_type = other DNA

SEQ ID NO: 110109 - DNA, 80 bp, synthetic construct
  source 1..80: mol_type = other DNA
ccaaatttattttcagctattacccggaactggtaacttgtttttccaaataagttgatcacggtataacgtgtttctcg

SEQ ID NO: 110110 - DNA, 80 bp, synthetic construct
  source 1..80: mol_type = other DNA
acatcagccacatccagttcaactgtcttctgatcaattccaaatctgtttttagcacagaccacatagaaaccagcatc

SEQ ID NO: 110111 - DNA, 80 bp, synthetic construct
  source 1..80: mol_type = other DNA
cggagagcatgaactgctcccatgccttcaagagttttaggtaagtgtatcttagctggaactgtatcagaaaaaaaaaa

SEQ ID NO: 110112 - DNA, 80 bp, synthetic construct
  source 1..80: mol_type = other DNA
gtagctctgacttggtaaactgtggcatcatcatctgtgacacttgcaatgatgagctggtggtagccacccttaaattc

SEQ ID NO: 110113 - DNA, 80 bp, synthetic construct; identical to SEQ ID NO: 21536
  source 1..80: mol_type = other DNA

SEQ ID NO: 110114 - DNA, 80 bp, synthetic construct
  source 1..80: mol_type = other DNA
caggccacaacacaagaatcttttgtgacagcagtaatagttggtttgccaggagcacctggcttttctattaaacaaaa

SEQ ID NO: 110115 - DNA, 80 bp, synthetic construct
  source 1..80: mol_type = other DNA
tttacaatggggttaggatatatatttctccttttagatatgcaaacattcaattaaagtgaaagaaaaggcacttgtac

SEQ ID NO: 110116 - DNA, 80 bp, synthetic construct
  source 1..80: mol_type = other DNA
tgccgaaagtgttctgagctgaaacccggaagtaatagccagcattttctgtgaggttcacaattctacaggttgtcact

SEQ ID NO: 110117 - DNA, 80 bp, synthetic construct; identical to SEQ ID NO: 21537
  source 1..80: mol_type = other DNA

SEQ ID NO: 110118 - DNA, 80 bp, synthetic construct
  source 1..80: mol_type = other DNA
ctgagctggactttgtatttcccagcatgagtcttacgttggacattcttcatgacaagatgagtatagtgctcagtgtt

SEQ ID NO: 110119 - DNA, 80 bp, synthetic construct
  source 1..80: mol_type = other DNA
gttgcttgcaggagaagcttactactggtttctacttctccaacctcattggtggctatgcaggtataaacaccttcatc

SEQ ID NO: 110120 - DNA, 80 bp, synthetic construct; identical to SEQ ID NO: 21538
  source 1..80: mol_type = other DNA

SEQ ID NO: 110121 - DNA, 80 bp, synthetic construct
  source 1..80: mol_type = other DNA
cgtcacattttatgtagagtgtttttttctctttatgattggaaggggattaataatgtataggcttttaagggactgta

SEQ ID NO: 110122 - DNA, 80 bp, synthetic construct
  source 1..80: mol_type = other DNA
catctgctgaggttgtgtgcttggaatggtttcctgtagaacttgtcatatttcctgtgtgtgtacttgcttttctttct

SEQ ID NO: 110123 - DNA, 80 bp, synthetic construct
  source 1..80: mol_type = other DNA
aatcataagtagagaaccaaaggctacttacatgtgagtttagtctttatagacatagcagttctgcgaggtctgctcag

SEQ ID NO: 110124 - DNA, 80 bp, synthetic construct; identical to SEQ ID NO: 21539
  source 1..80: mol_type = other DNA

SEQ ID NO: 110125 - DNA, 80 bp, synthetic construct
  source 1..80: mol_type = other DNA
atggatctttgcaaacaactggttcagaagcagggctggtctcactcaggccaacatcattctgtgcgatgatgcggaac

SEQ ID NO: 110126 - DNA, 80 bp, synthetic construct
  source 1..80: mol_type = other DNA
agctaacagaactcttggttacatcgagtacttctggaggattgcttggaggttctggaggatctgtaaatataagtgga

SEQ ID NO: 110127 - DNA, 80 bp, synthetic construct
  source 1..80: mol_type = other DNA
cttatgccaaactggttttctgctgaaacacggaaatggtattctacattctctttgaggccttttaccaccagagatgt

SEQ ID NO: 110128 - DNA, 80 bp, synthetic construct; identical to SEQ ID NO: 21540
  source 1..80: mol_type = other DNA

SEQ ID NO: 110129 - DNA, 80 bp, synthetic construct
  source 1..80: mol_type = other DNA
ccttgccttacaaagataccttcttggtatctttcatcaagttcataatcaggatattctggaaaaaaaggtagggtttc

SEQ ID NO: 110130 - DNA, 80 bp, synthetic construct
  source 1..80: mol_type = other DNA
acctgtattctgcaccctgaggtaggtgtgttagagtatactctcgaatcttggttggagtggtgttacacttggtccat

SEQ ID NO: 110131 - DNA, 80 bp, synthetic construct
  source 1..80: mol_type = other DNA
atatactggttaaagttgctgcaaagttgaaaattagctgtgccacctaacaaattcaatgagttgttgaaacggactgt

SEQ ID NO: 110132 - DNA, 80 bp, synthetic construct
  source 1..80: mol_type = other DNA
ctactaaaaacataaaaattagccatgcgtggtggcaggcacctgtaatcccagctactcaggaggctgaggcagaagaa

SEQ ID NO: 110133 - DNA, 80 bp, synthetic construct; identical to SEQ ID NO: 21541
  source 1..80: mol_type = other DNA

SEQ ID NO: 110134 - DNA, 80 bp, synthetic construct
  source 1..80: mol_type = other DNA
aaattgactccagagaagaatattaaaaattatttgccagaaatcgctagcagctggggtggggaagggactgattacaa

SEQ ID NO: 110135 - DNA, 80 bp, synthetic construct
  source 1..80: mol_type = other DNA
aaaatgtccttaccaattggatccatggcaacgatgggtttggaaggacgacttggtttcccagaccctcttgcattaat

SEQ ID NO: 110136 - DNA, 80 bp, synthetic construct; identical to SEQ ID NO: 21542
  source 1..80: mol_type = other DNA

SEQ ID NO: 110137 - DNA, 80 bp, synthetic construct
  source 1..80: mol_type = other DNA
tttaaatcatttaattatttaattatttttattaaaaatttttgacttttagcttcaggggtacatgtgcagtttgttac

SEQ ID NO: 110138 - DNA, 80 bp, synthetic construct
  source 1..80: mol_type = other DNA
tttcttccttccattcctttcttcctaactccctcctcttctctttcataagagtgaagatattaaaaaaaaaatcaagc

SEQ ID NO: 110139 - DNA, 80 bp, synthetic construct
  source 1..80: mol_type = other DNA
attaaaaacaaattcttttttgttaacattcagaatcagaggtggggagagtggtggaagggcctgtggacttacggatg

SEQ ID NO: 110140 - DNA, 80 bp, synthetic construct
  source 1..80: mol_type = other DNA
gagcgtcacgttgttctaccacataaccactcagtggagcaccaccgtccaattcaggtggttcccaggaaatggtaatt

SEQ ID NO: 110141 - DNA, 80 bp, synthetic construct; identical to SEQ ID NO: 21543
  source 1..80: mol_type = other DNA

SEQ ID NO: 110142 - DNA, 80 bp, synthetic construct
  source 1..80: mol_type = other DNA
ggtcttctgaggcattgtagaaagatcgattgttggcaacactatgggaaagaaatcaggcatttattcttaagcattat

SEQ ID NO: 110143 - DNA, 80 bp, synthetic construct
  source 1..80: mol_type = other DNA
aataagtattgttcaccttcatttaaggaagtaacagtgtgctctaggactgtgggttttaaggtgacaaccttcatcca

SEQ ID NO: 110144 - DNA, 80 bp, synthetic construct
  source 1..80: mol_type = other DNA
tcagatgtttcacaaggttctccaatgccataaatattttctggcagcactctgaaatagtacatggttccttctacaag

SEQ ID NO: 110145 - DNA, 80 bp, synthetic construct; identical to SEQ ID NO: 21544
  source 1..80: mol_type = other DNA

SEQ ID NO: 110146 - DNA, 80 bp, synthetic construct
  source 1..80: mol_type = other DNA
cttaccatagactttaacaaggactgttgctgatttcttgccagattggttttcagcttcaattgtgtattttccagcat

SEQ ID NO: 110147 - DNA, 80 bp, synthetic construct
  source 1..80: mol_type = other DNA
ggtcacagtcttctttagatcatctgcaagctcaagatctggtatttctggaaagttaatgacaaaatttaattaattca

SEQ ID NO: 110148 - DNA, 80 bp, synthetic construct
  source 1..80: mol_type = other DNA
gcagcaactctgaaggaatatttctggcccattttaaggtctggcacagtgaattcagtatttcttattgtggcattggt

SEQ ID NO: 110149 - DNA, 80 bp, synthetic construct; identical to SEQ ID NO: 21545
  source 1..80: mol_type = other DNA

SEQ ID NO: 110150 - DNA, 80 bp, synthetic construct
  source 1..80: mol_type = other DNA
ttgctttaggaaagtagatatttcttccctacttctttggccagctttactgtgtgttctctattagctaagctcattac

SEQ ID NO: 110151 - DNA, 80 bp, synthetic construct
  source 1..80: mol_type = other DNA
agtcccagtgactattcctttatagttcttgggctcagactctgtaaaaggatttgccacttatttttgaagctcttgtc

SEQ ID NO: 110152 - DNA, 80 bp, synthetic construct
  source 1..80: mol_type = other DNA
aatattttttcattaattggaaaatgctgtacaacttttagcaattctaattgctaacttaacagatgtaatagttaaaa

SEQ ID NO: 110153 - DNA, 80 bp, synthetic construct; identical to SEQ ID NO: 21546
  source 1..80: mol_type = other DNA

SEQ ID NO: 110154 - DNA, 80 bp, synthetic construct
  source 1..80: mol_type = other DNA
tgctgatttcattgccaccatcagattcaggttttgtccactgaatgatgatatgctctttgccagtcccaacttcttca

SEQ ID NO: 110155 - DNA, 80 bp, synthetic construct
  source 1..80: mol_type = other DNA
gccatatttgtttactgccctcactcggaatatgtactcattgttcttgatgagcctggtaacgacataggatagggttg

SEQ ID NO: 110156 - DNA, 80 bp, synthetic construct
  source 1..80: mol_type = other DNA
aggggaatctgaaacaggtgtaatgacaagccatgatgaagatcattctttctgcccacactggaaaatgctatataaat

SEQ ID NO: 110157 - DNA, 80 bp, synthetic construct
  source 1..80: mol_type = other DNA
aagtgtattttccactgtcacttctgtcacagaacttgatcacagcagttgctcgtttgccagtatactgcaaagagact

SEQ ID NO: 110158 - DNA, 80 bp, synthetic construct; identical to SEQ ID NO: 21547
  source 1..80: mol_type = other DNA

SEQ ID NO: 110159 - DNA, 80 bp, synthetic construct
  source 1..80: mol_type = other DNA
tggctaacacacggaactcataagtgtctccttcactgagagcagtcacggtgaagaaattgtcagatacaatggtgtag

SEQ ID NO: 110160 - DNA, 80 bp, synthetic construct
  source 1..80: mol_type = other DNA
cttgtgacatctgtcacctctggtctgcctggtgcatctggaagggatgcaaaaataaggttaaaatataccactctgag

SEQ ID NO: 110161 - DNA, 80 bp, synthetic construct; identical to SEQ ID NO: 21548
  source 1..80: mol_type = other DNA

SEQ ID NO: 110162 - DNA, 80 bp, synthetic construct
  source 1..80: mol_type = other DNA
tggtagacctcaggtctggtaggagcgcttggtgggactaaatataaacaaaggtattaagtatgaatacaattttataa

SEQ ID NO: 110163 - DNA, 80 bp, synthetic construct
  source 1..80: mol_type = other DNA
tctgaactgacacggaaagaatattccatgtattttgtgagatgagtgactttaatttgagtgcgcttgacactggaatt

SEQ ID NO: 110164 - DNA, 80 bp, synthetic construct
  source 1..80: mol_type = other DNA
atgaccacaactgtgacgctaaatgttttaacaccagctgtattttccagggtcaagaagtatcttccagagtcacctct

SEQ ID NO: 110165 - DNA, 80 bp, synthetic construct; identical to SEQ ID NO: 21549
  source 1..80: mol_type = other DNA

SEQ ID NO: 110166 - DNA, 80 bp, synthetic construct
  source 1..80: mol_type = other DNA
ctgtgaaagttagctgtttggtgtgaccagcttcaacccagaagtcagatcccttttgtctcatttcaagcaggtagcca

SEQ ID NO: 110167 - DNA, 80 bp, synthetic construct
  source 1..80: mol_type = other DNA
ctgcagaaacacggaaatagtacggaacaccttcggccaggtcattgaccttgaagatctgacgagtgcatttttcactg

SEQ ID NO: 110168 - DNA, 80 bp, synthetic construct
  source 1..80: mol_type = other DNA
ctttcacggtgaatgtgattgacttactaccactgttgttttccacagtaagggtatatttccctgcatcatttctgttg

SEQ ID NO: 110169 - DNA, 80 bp, synthetic construct
  source 1..80: mol_type = other DNA
aagaggcgaatactggccccagctctaacaacatgagtctgtttgaagtttgcatctatgtctaactcaggagctgttaa

SEQ ID NO: 110170 - DNA, 80 bp, synthetic construct; identical to SEQ ID NO: 21550
  source 1..80: mol_type = other DNA

SEQ ID NO: 110171 - DNA, 80 bp, synthetic construct
  source 1..80: mol_type = other DNA
attttcagccatgacatggaattcatactcattgccttctgtcagaccagtgactttgaatcttgtttcagagattggtc

SEQ ID NO: 110172 - DNA, 80 bp, synthetic construct
  source 1..80: mol_type = other DNA
ctgttatgttgctaggttctggaatgccaggggcatcaggaacagctgtaaaacaaaaacaaaaccccaaatcaattaga

SEQ ID NO: 110173 - DNA, 80 bp, synthetic construct; identical to SEQ ID NO: 21551
  source 1..80: mol_type = other DNA

SEQ ID NO: 110174 - DNA, 80 bp, synthetic construct
  source 1..80: mol_type = other DNA
gtccattaaaatacaactaggcatgtctctaatccaagttcataaattgtagcattaagaagctattttaaaagtacctt

SEQ ID NO: 110175 - DNA, 80 bp, synthetic construct
  source 1..80: mol_type = other DNA
atctttgaaccaagttactcgaggcactggtcttccttgtaccaaagctttaattctaaggctctctccggacttaataa

SEQ ID NO: 110176 - DNA, 80 bp, synthetic construct
  source 1..80: mol_type = other DNA
gccatatcacaaggccaggaagagtagtgacttctactgtgctaccaaagcctattttgaaagtaggattgataattgag

SEQ ID NO: 110177 - DNA, 80 bp, synthetic construct
  source 1..80: mol_type = other DNA
gccatcagctgcattcaagcaaggggatgattgtgttgttggatgtatgttgtattttaataacttcagtaaagatggac

SEQ ID NO: 110178 - DNA, 80 bp, synthetic construct; identical to SEQ ID NO: 21552
  source 1..80: mol_type = other DNA

SEQ ID NO: 110179 - DNA, 80 bp, synthetic construct
  source 1..80: mol_type = other DNA
gcatttcttgcaattattctgaactcatagcgatccccaggactgagtcctgtaactgtgtactgacattcactgacgtc

SEQ ID NO: 110180 - DNA, 80 bp, synthetic construct
  source 1..80: mol_type = other DNA
gacatcaatgtagtcaggagtgccaggtgggtctaaaaaattataaggaaggtaaatgcatcattacatttgtaaccagg

SEQ ID NO: 110181 - DNA, 80 bp, synthetic construct
  source 1..80: mol_type = other DNA
tagactgacttaaaataattcctcttgctttacatgaccagttctctagtgacaagaagatatgtaagaaggtgatgcag

SEQ ID NO: 110182 - DNA, 80 bp, synthetic construct; identical to SEQ ID NO: 21553
  source 1..80: mol_type = other DNA

SEQ ID NO: 110183 - DNA, 80 bp, synthetic construct
  source 1..80: mol_type = other DNA
cacaataatgcttgagacaagtggttggctgactccgtatctgttttctgctctcactctaaactggtactcagcatctt

SEQ ID NO: 110184 - DNA, 80 bp, synthetic construct
  source 1..80: mol_type = other DNA
cttcaggtacatcccatgacaggatgacactatcagccttgatttcatcaaatcgaatgggtcctttgggctttgatggt

SEQ ID NO: 110185 - DNA, 80 bp, synthetic construct
  source 1..80: mol_type = other DNA
gcaagccatctttcagccaactgatggatggtttgggttttcccttataaggtaattcaaggtgcacattgtgcccaatt

SEQ ID NO: 110186 - DNA, 80 bp, synthetic construct; identical to SEQ ID NO: 21554
  source 1..80: mol_type = other DNA

SEQ ID NO: 110187 - DNA, 80 bp, synthetic construct
  source 1..80: mol_type = other DNA
tttctgcaagaactctgaagaagaatggagtcttctccgacaaatctattagcttgaaggatgtgctagaacatttgtgt

SEQ ID NO: 110188 - DNA, 80 bp, synthetic construct
  source 1..80: mol_type = other DNA
gcactttaacactcacagttgaagacttaggttcaccaactccattttctattgtgagaatatattttcctgtatcattg

SEQ ID NO: 110189 - DNA, 80 bp, synthetic construct; identical to SEQ ID NO: 21555
  source 1..80: mol_type = other DNA

SEQ ID NO: 110190 - DNA, 80 bp, synthetic construct
  source 1..80: mol_type = other DNA
aattgactccaggtttcaggttggataccacatattctgtagttctgacctctcctttggtagagacagtagtccattcc

SEQ ID NO: 110191 - DNA, 80 bp, synthetic construct
  source 1..80: mol_type = other DNA
gcaggtggacctggaggatctggaatggccattcacaataaaataattacacaatcatgtacaatttagtcacacaggtg

SEQ ID NO: 110192 - DNA, 80 bp, synthetic construct
  source 1..80: mol_type = other DNA
tttttgtctggtgtcacggatagtctcttttagtactttaaaccatcctaggctcttcttgtctcgtttttcaaggaaat

SEQ ID NO: 110193 - DNA, 80 bp, synthetic construct
  source 1..80: mol_type = other DNA
gaagggaaaacaaggtacaagaatccacattactgataaattatacctttgatgttcgcattctttccaagaacattggt

SEQ ID NO: 110194 - DNA, 80 bp, synthetic construct; identical to SEQ ID NO: 21556
  source 1..80: mol_type = other DNA

SEQ ID NO: 110195 - DNA, 80 bp, synthetic construct
  source 1..80: mol_type = other DNA
tacagtcttaaattcaattggtccaccaggtgggcctggtttgtctatcagtgaaaggacaaaacacgatgttagtactt

SEQ ID NO: 110196 - DNA, 80 bp, synthetic construct
  source 1..80: mol_type = other DNA
ttccttagttttaattcatagcatccactattaaggcgatcggcatctttgatgagtatagatgcgaggtccgtggtatt

SEQ ID NO: 110197 - DNA, 80 bp, synthetic construct
  source 1..80: mol_type = other DNA
tgccagctctgagcttcacagatgtacctgctctgtatttgacaacttctgtatattctagaggcaaatcaattacagga

SEQ ID NO: 110198 - DNA, 80 bp, synthetic construct; identical to SEQ ID NO: 21557
  source 1..80: mol_type = other DNA

SEQ ID NO: 110199 - DNA, 80 bp, synthetic construct
  source 1..80: mol_type = other DNA
ccaagtgtggatggttcatgtcagacacttaaagtctgaattctctacccacagagctacataattactggacagatttt

SEQ ID NO: 110200 - DNA, 80 bp, synthetic construct
  source 1..80: mol_type = other DNA
tacagtggctcaattttctcttagcaaatggagatcttttaggtaaagtgtcacaggatacctgactctcatgacgtttt

SEQ ID NO: 110201 - DNA, 80 bp, synthetic construct; identical to SEQ ID NO: 21558
  source 1..80: mol_type = other DNA

SEQ ID NO: 110202 - DNA, 80 bp, synthetic construct
  source 1..80: mol_type = other DNA
aaaatacaaaaaattagctgggtgtggtggggcatgcctgtaatcccagctactcaggtgactgaggcacgagaatcgtt

SEQ ID NO: 110203 - DNA, 80 bp, synthetic construct
  source 1..80: mol_type = other DNA
ccaaaaaatgaagtctctgtttagtctgtggcttatttaagagcaatattctctaggaactcaaccatggtttaattatt

SEQ ID NO: 110204 - DNA, 80 bp, synthetic construct
  source 1..80: mol_type = other DNA
agagggctggaaaggtatttaaggaattttcctcagactcccagctagtccataatttcttccaaaaaccccattaaggc

SEQ ID NO: 110205 - DNA, 80 bp, synthetic construct; identical to SEQ ID NO: 21559
  source 1..80: mol_type = other DNA

SEQ ID NO: 110206 - DNA, 80 bp, synthetic construct
  source 1..80: mol_type = other DNA
ggtaataagagaagcagattagcggcacttataatattttgcttcgcagaagtaagatttgcatttttgttatcagaact

SEQ ID NO: 110207 - DNA, 80 bp, synthetic construct
  source 1..80: mol_type = other DNA
gaccagtttgttggctttttgccataaaatactgtttctgtctttcatttccaggtgatagcctacgactgcactgcctc

SEQ ID NO: 110208 - DNA, 80 bp, synthetic construct
  source 1..80: mol_type = other DNA
gaaaagttggacaacttactgtatggtagtttgacagtcacacaagctgaatctatatgatcactgatgccaaagcggtt

SEQ ID NO: 110209 - DNA, 80 bp, synthetic construct
  source 1..80: mol_type = other DNA
tagaatgtagttggtaacttgacttccaccgtcatacttaggtggctcccatttgagagtcacactttcttcagttatat

SEQ ID NO: 110210 - DNA, 80 bp, synthetic construct; identical to SEQ ID NO: 21560
  source 1..80: mol_type = other DNA

SEQ ID NO: 110211 - DNA, 80 bp, synthetic construct
  source 1..80: mol_type = other DNA
caaattttgcttctacacaaaattagacatacctagttgctccttaataagaacaggaagcagaagctctctcgggtcac

SEQ ID NO: 110212 - DNA, 80 bp, synthetic construct
  source 1..80: mol_type = other DNA
tttctagtgcttcaacgacatagtgtacaattctgcttccgccatcatgttcaggcttcagccaggtcagggaaacactg

SEQ ID NO: 110213 - DNA, 80 bp, synthetic construct; identical to SEQ ID NO: 21561
  source 1..80: mol_type = other DNA

SEQ ID NO: 110214 - DNA, 80 bp, synthetic construct
  source 1..80: mol_type = other DNA
tacaatttctgtacacacgcacatacacacatatgatatatgtcatacacacatactatatatatataatctgtgtatat

SEQ ID NO: 110215 - DNA, 80 bp, synthetic construct
  source 1..80: mol_type = other DNA
ttcactagagattccattttgtgccatagtatgaatagtttggggtgtgaagggtgtgaacccaaaagcatttaagatga

SEQ ID NO: 110216 - DNA, 80 bp, synthetic construct
  source 1..80: mol_type = other DNA
agatagctccttcttgtaaattggtaactttgtaggagaggcggttacagttgttggtcacagagacccatgctttcttg

SEQ ID NO: 110217 - DNA, 80 bp, synthetic construct
  source 1..80: mol_type = other DNA
aagcagcactcaaaacattctgaattgttaatgtgtactttccagagtcatttctgttggcattttcaatggtcagtgat

SEQ ID NO: 110218 - DNA, 80 bp, synthetic construct; identical to SEQ ID NO: 21562
  source 1..80: mol_type = other DNA

SEQ ID NO: 110219 - DNA, 80 bp, synthetic construct
  source 1..80: mol_type = other DNA
gcttaacccaggcaatagttatagttgtcttgcctgagtccacaattttgggtttggatggaggagatggtaggaacact

SEQ ID NO: 110220 - DNA, 80 bp, synthetic construct
  source 1..80: mol_type = other DNA
ggctatttttctctcgcctttcaattatatatccagatatttcactacctccatcactctcgggtcttgaccagcaaagt

SEQ ID NO: 110221 - DNA, 80 bp, synthetic construct; identical to SEQ ID NO: 21563
  source 1..80: mol_type = other DNA

SEQ ID NO: 110222 - DNA, 80 bp, synthetic construct
  source 1..80: mol_type = other DNA
cattcttcagtgttagtacatattgcccagtgtctcgtcttatacagtctttaactgttaacaaagtatgattgtctgtt

SEQ ID NO: 110223 - DNA, 80 bp, synthetic construct
  source 1..80: mol_type = other DNA
gaggctcaacatcatctttaactataataggcccagtggattcagatggctcactaactgagtcagcagcattccttgca

SEQ ID NO: 110224 - DNA, 80 bp, synthetic construct
  source 1..80: mol_type = other DNA
tagaccatttaagtgacactgattttcttgtgatatttgtgacttcaggttgtccaggagggtcacaaggatctcttgca

SEQ ID NO: 110225 - DNA, 80 bp, synthetic construct
  source 1..80: mol_type = other DNA
ctttatactcaagatgatagccaattactcgacttcctccatcattaactggcacttgccaggttacaagcatggtagat

SEQ ID NO: 110226 - DNA, 80 bp, synthetic construct; identical to SEQ ID NO: 21564
  source 1..80: mol_type = other DNA

SEQ ID NO: 110227 - DNA, 80 bp, synthetic construct
  source 1..80: mol_type = other DNA
aggacctggaggtcctggtctgtcaaggacaattatagtaataggaactgttatggatccagcactgtttgaaacacata

SEQ ID NO: 110228 - DNA, 80 bp, synthetic construct
  source 1..80: mol_type = other DNA
cttaagttgttctctagcctttacattgaaagtatggaaaggaagctcaactgaaggctttatttcaatatcccttgcaa

SEQ ID NO: 110229 - DNA, 80 bp, synthetic construct; identical to SEQ ID NO: 21565
  source 1..80: mol_type = other DNA

SEQ ID NO: 110230 - DNA, 80 bp, synthetic construct
  source 1..80: mol_type = other DNA
agtgcaattatttgtaatggtagcataggcttttcttgtagtttctcgtttttcgacaatgtagtttgtaatcttagctc

SEQ ID NO: 110231 - DNA, 80 bp, synthetic construct
  source 1..80: mol_type = other DNA
actgtcaaatctggtaacattatcaatcaccaacattgtaaatgagctggtcacctctatctgagccctgtcagtgagaa

SEQ ID NO: 110232 - DNA, 80 bp, synthetic construct
  source 1..80: mol_type = other DNA
aggtagagttgcaggttcacctacaccttcagaattgatggcacaaatacggaagttatattcagtgttttctttaagct

SEQ ID NO: 110233 - DNA, 80 bp, synthetic construct
  source 1..80: mol_type = other DNA
tctacaacatagcctttaacaggtgcgccaccatcataaattggcttactccatgccagggagacagaagatctggaagt

SEQ ID NO: 110234 - DNA, 80 bp, synthetic construct; identical to SEQ ID NO: 21566
  source 1..80: mol_type = other DNA

SEQ ID NO: 110235 - DNA, 80 bp, synthetic construct
  source 1..80: mol_type = other DNA
ttcacagccatgacacggaaaatgtactcattaccaggaagaagtttagtaactttgtagttaagggcctgtacctcagt

SEQ ID NO: 110236 - DNA, 80 bp, synthetic construct
  source 1..80: mol_type = other DNA
tcaagtacctttacagtgatgggtatagactttgtaccaccaacattgctgagtttcagaatatattgtcctccatcagt

SEQ ID NO: 110237 - DNA, 80 bp, synthetic construct
  source 1..80: mol_type = other DNA
tgaacaacgatgacatctttatattttggatccagagaggcatttggtgcatcaatttcatctcttgcagtaatggcacc

SEQ ID NO: 110238 - DNA, 80 bp, synthetic construct; identical to SEQ ID NO: 21567
  source 1..80: mol_type = other DNA

SEQ ID NO: 110239 - DNA, 80 bp, synthetic construct
  source 1..80: mol_type = other DNA
tgccaacaatattttcagcagaaactttgaactcatactcaaggccctcatcaagcccagttgttttgaatttggtgtcc

SEQ ID NO: 110240 - DNA, 80 bp, synthetic construct
  source 1..80: mol_type = other DNA
gtccaggttctttaaatggatattgtacaataactgccttagaatccagtggggcactttttccatacctgttttcagca

SEQ ID NO: 110241 - DNA, 80 bp, synthetic construct; identical to SEQ ID NO: 21568
  source 1..80: mol_type = other DNA

SEQ ID NO: 110242 - DNA, 80 bp, synthetic construct
  source 1..80: mol_type = other DNA
acgtttactcttgttgtctgtttaagaggctcaccatctttgacccaagaaatgttaggtcttggtcggcctataactgg

SEQ ID NO: 110243 - DNA, 80 bp, synthetic construct
  source 1..80: mol_type = other DNA
tcttgtccagaactcaaaccagtaacaactgcattacagactttggattcagccacaatgctccatttttcagttccttt

SEQ ID NO: 110244 - DNA, 80 bp, synthetic construct
  source 1..80: mol_type = other DNA
ggaacaccaactccaaattcattttcagccatgactctgaagtaataaatggctccttctgtaaggttttccactttaaa

SEQ ID NO: 110245 - DNA, 80 bp, synthetic construct; identical to SEQ ID NO: 21569
  source 1..80: mol_type = other DNA

SEQ ID NO: 110246 - DNA, 80 bp, synthetic construct
  source 1..80: mol_type = other DNA
ccaccagctcttacaacaattccttttcttaattcggagtcaaggtcaagttcaggtgcttcaagtttatcttctggttt

SEQ ID NO: 110247 - DNA, 80 bp, synthetic construct
  source 1..80: mol_type = other DNA
ttacagatttctactacatatcccaagatctcactgccgccatcatagatgggtttaccccaggcaagtgtgattgaatt

SEQ ID NO: 110248 - DNA, 80 bp, synthetic construct
  source 1..80: mol_type = other DNA
actcttagacgcaaatctgtaatgcggcgtttattacattttatccatcgaatgccacttctgtctcttttctctacaat

SEQ ID NO: 110249 - DNA, 80 bp, synthetic construct
  source 1..80: mol_type = other DNA
ccatatttgttgacagccattatacggaaaacatattcattaccttctaagagtttggtaactttcagagaattggtcac

SEQ ID NO: 110250 - DNA, 80 bp, synthetic construct; identical to SEQ ID NO: 21570
  source 1..80: mol_type = other DNA

SEQ ID NO: 110251 - DNA, 80 bp, synthetic construct
  source 1..80: mol_type = other DNA
ccagcatttaccacaattgtgtctctgaattttggatccattgaaattcttgggagttcaacctcatccttggcagttat

SEQ ID NO: 110252 - DNA, 80 bp, synthetic construct
  source 1..80: mol_type = other DNA
cgtttctctacaatgtagcctgtaatcatacttccaccatcatacacaggtttggtccactgtaaagtgatttcatttct

SEQ ID NO: 110253 - DNA, 80 bp, synthetic construct
  source 1..80: mol_type = other DNA
gtgtcatgaataatagttttgttgacctttgtccacaaaatactgtttctttcttttctctccaggtggtaacctatgac

SEQ ID NO: 110254 - DNA, 80 bp, synthetic construct; identical to SEQ ID NO: 21571
  source 1..80: mol_type = other DNA

SEQ ID NO: 110255 - DNA, 80 bp, synthetic construct
  source 1..80: mol_type = other DNA
agagttacaatttcgatggatgctgtcttctgaccaacaacattggcaactgtgattccatattgtccaccatcatcctt

SEQ ID NO: 110256 - DNA, 80 bp, synthetic construct
  source 1..80: mol_type = other DNA
aattggcacttctattttcaaatcttggccaacctgtacactgtaactactgaatgcaggttttacatctggctcaatta

SEQ ID NO: 110257 - DNA, 80 bp, synthetic construct
  source 1..80: mol_type = other DNA
gtgtttagcttgcatttccacaatatactgaatgattttactgccaccatcatgttcaggttttgtccaactcagagaga

SEQ ID NO: 110258 - DNA, 80 bp, synthetic construct; identical to SEQ ID NO: 21572
  source 1..80: mol_type = other DNA

SEQ ID NO: 110259 - DNA, 80 bp, synthetic construct
  source 1..80: mol_type = other DNA
taacaaaggcagactttgttccactgctgttttctaatgtaagcgtatattttccactatcatatcggttgacattgtca

SEQ ID NO: 110260 - DNA, 80 bp, synthetic construct
  source 1..80: mol_type = other DNA
ctaggtcaagatcaatgtctggtgcttctaatttttcttcaactataataggtccagggacgtcagcatgttctccaact

SEQ ID NO: 110261 - DNA, 80 bp, synthetic construct
  source 1..80: mol_type = other DNA
agccaccatcatatattggtttgctccaagaaaggaatactgaagatctggttatgtctatgactttggggttgtttggg

SEQ ID NO: 110262 - DNA, 80 bp, synthetic construct; identical to SEQ ID NO: 21573
  source 1..80: mol_type = other DNA

SEQ ID NO: 110263 - DNA, 80 bp, synthetic construct
  source 1..80: mol_type = other DNA
ccaacaccatatttgtttactgccattatacggaaagtatattcattgccttcaagaagcttagtaaccttgcagctgag

SEQ ID NO: 110264 - DNA, 80 bp, synthetic construct
  source 1..80: mol_type = other DNA
ggtggccctggtctgtcaagaaccttgacattcacagtaactgatctttctcctgcaacatttttggccttcagtatgta

SEQ ID NO: 110265 - DNA, 80 bp, synthetic construct; identical to SEQ ID NO: 21574
  source 1..80: mol_type = other DNA

SEQ ID NO: 110266 - DNA, 80 bp, synthetic construct
  source 1..80: mol_type = other DNA
aattctttcttctcaacaatataaccagtgatcttgcttccaccgtcataggtgggtttcttccactgaagagtcacaga

SEQ ID NO: 110267 - DNA, 80 bp, synthetic construct
  source 1..80: mol_type = other DNA
aacttggtttgaggaataggtgttttattcaacttaacccagaggatgctatttctttccttgcgttctagatgatagcc

SEQ ID NO: 110268 - DNA, 80 bp, synthetic construct
  source 1..80: mol_type = other DNA
ctgttttcagctgcaattctaaactgatattcacatccagtcttcagtctgcaagcctttattgttgtccttgcaactgt

SEQ ID NO: 110269 - DNA, 80 bp, synthetic construct
  source 1..80: mol_type = other DNA
ttgtcaagaacgataacattaagggtttcaatagcttcaccagctgagttagtcagtttaaccacataatggccaacatc

SEQ ID NO: 110270 - DNA, 80 bp, synthetic construct; identical to SEQ ID NO: 21575
  source 1..80: mol_type = other DNA

SEQ ID NO: 110271 - DNA, 80 bp, synthetic construct
  source 1..80: mol_type = other DNA
attcggctgcctccatcatgctctggtttctcccaagagagtgacacactatttcttgtgacatccatcaaagttatttt

SEQ ID NO: 110272 - DNA, 80 bp, synthetic construct
  source 1..80: mol_type = other DNA
gttgaatatgcttttcttgttgattcccgcttttcaacaatatagttcttgatttttgaacctccatcaaggagaggtgg

SEQ ID NO: 110273 - DNA, 80 bp, synthetic construct
  source 1..80: mol_type = other DNA
tttccaacaataagcagggtgtaagagcttgtggattcgatgctagctttatctaaagattctccatggtcccgggccca

SEQ ID NO: 110274 - DNA, 80 bp, synthetic construct; identical to SEQ ID NO: 21576
  source 1..80: mol_type = other DNA

SEQ ID NO: 110275 - DNA, 80 bp, synthetic construct
  source 1..80: mol_type = other DNA
tttctgaaccaccatcatagataggtttattccaagcgattgaaatggatgatctgcttgtatccagaacacgtgggtta

SEQ ID NO: 110276 - DNA, 80 bp, synthetic construct
  source 1..80: mol_type = other DNA
ttttgttgcatttaatccagcgttggccagctttatcacgccgttccacaatataattgatgatttcacttccaccatca

SEQ ID NO: 110277 - DNA, 80 bp, synthetic construct
  source 1..80: mol_type = other DNA
atatgtattcattgcctttcaagagtttagtgacctttagctttgttacttggacttctgaggctacatttgtccatgcc

SEQ ID NO: 110278 - DNA, 80 bp, synthetic construct; identical to SEQ ID NO: 21577
  source 1..80: mol_type = other DNA

SEQ ID NO: 110279 - DNA, 80 bp, synthetic construct
  source 1..80: mol_type = other DNA
ctgaatgcttcacctgcttttaatataaccgtgtccttaaatttaacatccacctttatctttggtgcctcaacatcatc

SEQ ID NO: 110280 - DNA, 80 bp, synthetic construct
  source 1..80: mol_type = other DNA
ttaggaaggtctctcttttcaacgatataactggtaattttaaagcccccagtatattcaggcttagcccatttaagtgt

SEQ ID NO: 110281 - DNA, 80 bp, synthetic construct
  source 1..80: mol_type = other DNA
gatttgaaaatgttgcctggtactaaagctttgctcacagtctgccagagaataccatttcgttcttttctttcaacatg

SEQ ID NO: 110282 - DNA, 80 bp, synthetic construct; identical to SEQ ID NO: 21578
  source 1..80: mol_type = other DNA

SEQ ID NO: 110283 - DNA, 80 bp, synthetic construct
  source 1..80: mol_type = other DNA
agatgaaacttcatcaaatttgattggtccagtaggtggccctgggatatcatggacttgaatggtgatgacatcaccaa

SEQ ID NO: 110284 - DNA, 80 bp, synthetic construct
  source 1..80: mol_type = other DNA
gaagtcgctgtggtttcaaaattaactctctgtgtctgtttaagaatttggtctccttttttccatgtcactgtgggctt

SEQ ID NO: 110285 - DNA, 80 bp, synthetic construct
  source 1..80: mol_type = other DNA
actgccatcacttggaaggtatattcctctccttcagttagattcctcacaacacattctaaccctttcacggttgtgat

SEQ ID NO: 110286 - DNA, 80 bp, synthetic construct
  source 1..80: mol_type = other DNA
tttacgggctctgtagtttctgttggctcaccaattccatattcattctctgccatcactctgaagaaatattcacaccc

SEQ ID NO: 110287 - DNA, 80 bp, synthetic construct; identical to SEQ ID NO: 21579
  source 1..80: mol_type = other DNA

SEQ ID NO: 110288 - DNA, 80 bp, synthetic construct
  source 1..80: mol_type = other DNA
tatctgttacattctgggataatcagaagagtaaatgattccgtattttcaatgttggctcggtttttcaggttgatgtt

SEQ ID NO: 110289 - DNA, 80 bp, synthetic construct
  source 1..80: mol_type = other DNA
gctggctccccaacacctgcatcgttgatggcactgattctgaagttgtatttttctttagtctgaagatcaggaacaac

SEQ ID NO: 110290 - DNA, 80 bp, synthetic construct; identical to SEQ ID NO: 21580
  source 1..80: mol_type = other DNA

SEQ ID NO: 110291 - DNA, 80 bp, synthetic construct
  source 1..80: mol_type = other DNA
ttgcagtcctgttactttgcacctgagatcggaaactggtgtttttattgctctcacccatcgcaggcttttcttttctc

SEQ ID NO: 110292 - DNA, 80 bp, synthetic construct
  source 1..80: mol_type = other DNA
cctaaactctgctataaatgtttccatgtcaattccctcacatgctctacataccaaatctgtctaccattttgacaggt

SEQ ID NO: 110293 - DNA, 80 bp, synthetic construct
  source 1..80: mol_type = other DNA
tataggacttaattggtgagccgccatcttccaagggaggtgtccatgtaagtgttgctttttcagcagaaacattactg

SEQ ID NO: 110294 - DNA, 80 bp, synthetic construct; identical to SEQ ID NO: 21581
  source 1..80: mol_type = other DNA

SEQ ID NO: 110295 - DNA, 80 bp, synthetic construct
  source 1..80: mol_type = other DNA
aaaatggacctaccgtattcatccttgcaaataatggtttctgtactttctgatggagcactgatagcacctgctgtatt

SEQ ID NO: 110296 - DNA, 80 bp, synthetic construct
  source 1..80: mol_type = other DNA
ttaggttcagtccaaatgagagtcactgaattccttgttatgttaataacctcaggttttccaggaggatctaaaacata

SEQ ID NO: 110297 - DNA, 80 bp, synthetic construct; identical to SEQ ID NO: 21582
  source 1..80: mol_type = other DNA

SEQ ID NO: 110298 - DNA, 80 bp, synthetic construct
  source 1..80: mol_type = other DNA
atacttttattacccaagcatagtgccattttttttttcctcttggaatatgcatagttgttgtcttttttggtgaacaa

SEQ ID NO: 110299 - DNA, 80 bp, synthetic construct
  source 1..80: mol_type = other DNA
aagcagataatgttatcgataagcacatgttcaactgttctcagggaaatatttgtgaggaatcttgatgtaaaagctgt

SEQ ID NO: 110300 - DNA, 80 bp, synthetic construct
  source 1..80: mol_type = other DNA
aagaagcctcctcaaaaccgtgttttgctttacgtcttctgaatttaagacacttaccaaatggatgtctcgcaacaatt

SEQ ID NO: 110301 - DNA, 80 bp, synthetic construct
  source 1..80: mol_type = other DNA
cacgtcacccacttgttgttcacagaatccctcttctctaggatatagttggtgatttcagaacctccatcatcctttgg

SEQ ID NO: 110302 - DNA, 80 bp, synthetic construct; identical to SEQ ID NO: 21583
  source 1..80: mol_type = other DNA

SEQ ID NO: 110303 - DNA, 80 bp, synthetic construct
  source 1..80: mol_type = other DNA
aaggccaggcgattaactttttcaaatagttctagcttttaacggatttttagataagctagtgagtgggacacaagagt

SEQ ID NO: 110304 - DNA, 80 bp, synthetic construct
  source 1..80: mol_type = other DNA
actctgaaggtatattccttcccttcagtcaaatcttttgcagagtactgtaggcttaaggatttcataactcgttgcca

SEQ ID NO: 110305 - DNA, 80 bp, synthetic construct
  source 1..80: mol_type = other DNA
taagtgtaagccccatataacaaaggaaggatataactcaaaatgatgggatgatggttcatttgcttacgggaagcttt

SEQ ID NO: 110306 - DNA, 80 bp, synthetic construct; identical to SEQ ID NO: 21584
  source 1..80: mol_type = other DNA

SEQ ID NO: 110307 - DNA, 80 bp, synthetic construct
  source 1..80: mol_type = other DNA
cctttttaccacagctgttctccagggttaagatatattttcctgcatcatatttgttcacattttcacagcgcaagaaa

SEQ ID NO: 110308 - DNA, 80 bp, synthetic construct
  source 1..80: mol_type = other DNA
caagttctccctcaggtggaactgtttaattttgggtgaagaagttaaataaaaatttaatagtcaaatgtatttccagg

SEQ ID NO: 110309 - DNA, 80 bp, synthetic construct
  source 1..80: mol_type = other DNA
cggaggatctgtacctcctctttcatgagccttatgtactctgaaatgctacatatattaaaaggaaagtagacgattga

SEQ ID NO: 110310 - DNA, 80 bp, synthetic construct; identical to SEQ ID NO: 21585
  source 1..80: mol_type = other DNA

SEQ ID NO: 110311 - DNA, 80 bp, synthetic construct
  source 1..80: mol_type = other DNA
aaatcatgtgcatttgatttgcctgttccacaataccgtaaagtacccacccagctctcctaaaaagtactcttggagtt

SEQ ID NO: 110312 - DNA, 80 bp, synthetic construct
  source 1..80: mol_type = other DNA
tatccaatcttattaacggcatacacacggaattgatattgtgtgtcttccatcaggccagtaacctcaaagcgggtttt

SEQ ID NO: 110313 - DNA, 80 bp, synthetic construct
  source 1..80: mol_type = other DNA
ggtgggccaggaggatctgagaataaataatgataggaaattttcatgaaaacttccttcctgggtgtttaatgctgctt

SEQ ID NO: 110314 - DNA, 80 bp, synthetic construct; identical to SEQ ID NO: 21586
  source 1..80: mol_type = other DNA

SEQ ID NO: 110315 - DNA, 80 bp, synthetic construct
  source 1..80: mol_type = other DNA
tgaaaaaccaccgggaaatgttcctaccatatgggtttttggcaattgctggttcagtgaagactggatcgcctactcca

SEQ ID NO: 110316 - DNA, 80 bp, synthetic construct
  source 1..80: mol_type = other DNA
cttcaagaggcggttcccaagaaagcatagcacgatctgaatacattttgttgattttaacagatgctggaggacccggt

SEQ ID NO: 110317 - DNA, 80 bp, synthetic construct
  source 1..80: mol_type = other DNA
ttaggtaattgaaatatgtgatttctaaagctctttttaactctaaaacgtggttctgtcataagaataattctgtgcat

SEQ ID NO: 110318 - DNA, 80 bp, synthetic construct; identical to SEQ ID NO: 21587
  source 1..80: mol_type = other DNA

SEQ ID NO: 110319 - DNA, 80 bp, synthetic construct
  source 1..80: mol_type = other DNA
aagatttcatagccacactcaggtctatcctgggagggactggaaagaaataagataaaggacttaatgtatgcaaagct

SEQ ID NO: 110320 - DNA, 80 bp, synthetic construct
  source 1..80: mol_type = other DNA
aataactattgaaattatatagttgccacagttgtgtatcttgctttttaatttagcatgttattatgattctccataat

SEQ ID NO: 110321 - DNA, 80 bp, synthetic construct
  source 1..80: mol_type = other DNA
tggatcagaaggttcagaaggtgggctaatgtttaccgcggtcctggcaatagctctaaattgatactgagctttctctt

SEQ ID NO: 110322 - DNA, 80 bp, synthetic construct; identical to SEQ ID NO: 21588
  source 1..80: mol_type = other DNA

SEQ ID NO: 110323 - DNA, 80 bp, synthetic construct
  source 1..80: mol_type = other DNA
tatgtcatcttcattgtaagagatagaacatattcttaaatgggagttgtaatcttcagatctctactactctctgtgtc

SEQ ID NO: 110324 - DNA, 80 bp, synthetic construct
  source 1..80: mol_type = other DNA
gattctgaatgaatactcaagaccttctacaaggccagcacaaggatattcagttgaccggacaagagtatcattggctt

SEQ ID NO: 110325 - DNA, 80 bp, synthetic construct; identical to SEQ ID NO: 21589
  source 1..80: mol_type = other DNA

SEQ ID NO: 110326 - DNA, 80 bp, synthetic construct
  source 1..80: mol_type = other DNA
aagtttttgtgactgaagctagagccgtgacccagtcacctcggcttacatcacacttctccactatataattggtgatg

SEQ ID NO: 110327 - DNA, 80 bp, synthetic construct
  source 1..80: mol_type = other DNA
gagcttcatatttagatggccatttgtctaatacttaacttacccatgactacaactttgattttctgagtgtctgtccc

SEQ ID NO: 110328 - DNA, 80 bp, synthetic construct
  source 1..80: mol_type = other DNA
atcttctccttttttccatttacaggtgggatgaggctttccatacacatgggcttcaattcggagttttttcccagctt

SEQ ID NO: 110329 - DNA, 80 bp, synthetic construct; identical to SEQ ID NO: 21590
  source 1..80: mol_type = other DNA

SEQ ID NO: 110330 - DNA, 80 bp, synthetic construct
  source 1..80: mol_type = other DNA
tcccctccctgtgtccatgtgttttcattgttcagctcccacttatgagtgagaacatgtggtgtttggttttctgttct

SEQ ID NO: 110331 - DNA, 80 bp, synthetic construct
  source 1..80: mol_type = other DNA
ctttgctattgtgaacagtgccacaataaacatacatgtgcatgtgtctttatagtagaatgatttataatcctttgggt

SEQ ID NO: 110332 - DNA, 80 bp, synthetic construct
  source 1..80: mol_type = other DNA
tcctgactttttagtgatcaccattctaactggtgtgagatggtatctcattgtggttttgatttgcatttctctagtga

SEQ ID NO: 110333 - DNA, 80 bp, synthetic construct
  source 1..80: mol_type = other DNA
tgtgtttttggcccactcatgtgtttgaaagccactgttctctactgtttttcaagaatttctagagctagattcctcag

SEQ ID NO: 110334 - DNA, 80 bp, synthetic construct; identical to SEQ ID NO: 21591
  source 1..80: mol_type = other DNA

SEQ ID NO: 110335 - DNA, 80 bp, synthetic construct
  source 1..80: mol_type = other DNA
cttgggggatccggctcacctagaagaaaaacataatttagaagattacctaggtaacctaatcaaatcccctttgttaa

SEQ ID NO: 110336 - DNA, 80 bp, synthetic construct
  source 1..80: mol_type = other DNA
ttcagaagtggattaaaatggtattagtatcttgaccttgctaaaataggagactggggttaaaaggaggaagaaagcat

SEQ ID NO: 110337 - DNA, 80 bp, synthetic construct; identical to SEQ ID NO: 21592
  source 1..80: mol_type = other DNA

SEQ ID NO: 110338 - DNA, 80 bp, synthetic construct
  source 1..80: mol_type = other DNA
acaaattcatttttgaagtgggagggagaagcattttagtaacccacctaatactctgacatttacgaatacagcctttt

SEQ ID NO: 110339 - DNA, 80 bp, synthetic construct
  source 1..80: mol_type = other DNA
tcctctcactatagcaaagagacgaatagggcatcctgctctcactatgaccagtttcctcatgctggcatccaaatcaa

SEQ ID NO: 110340 - DNA, 80 bp, synthetic construct
  source 1..80: mol_type = other DNA
ataccaacttggttttgggcacacaccctgaactcatattcctggttttcatccaagctggtaacagtgaattccttgcg

SEQ ID NO: 110341 - DNA, 80 bp, synthetic construct; identical to SEQ ID NO: 21593
  source 1..80: mol_type = other DNA

SEQ ID NO: 110342 - DNA, 80 bp, synthetic construct
  source 1..80: mol_type = other DNA
atttatcgaatacttctgtgcttgagattaagagttgctgtaatatcagaaaaaacaaggacatcctacctatggggtct

SEQ ID NO: 110343 - DNA, 80 bp, synthetic construct
  source 1..80: mol_type = other DNA
gcttttcctttttctccaaaaagtatccagttatagactttccaccatcatattcaggtggattccaaaccacagtcatc

SEQ ID NO: 110344 - DNA, 80 bp, synthetic construct
  source 1..80: mol_type = other DNA
ttactgtagtaccaggtgtcaagacagtagcagaataggtagaccaaaccattcgctttgtctcacatttttctagaata

SEQ ID NO: 110345 - DNA, 80 bp, synthetic construct; identical to SEQ ID NO: 21594
  source 1..80: mol_type = other DNA

SEQ ID NO: 110346 - DNA, 80 bp, synthetic construct
  source 1..80: mol_type = other DNA
agtcttctttcacaacaacttcctctgtcttcacccagtcactttccccaccttcattctttgtttgcactctgaactca

SEQ ID NO: 110347 - DNA, 80 bp, synthetic construct
  source 1..80: mol_type = other DNA
agacaaatgtctttcctttatctgcaatgtgaaggttttcaggctcacctggtctgtcaatagggttaatagccagaatg

SEQ ID NO: 110348 - DNA, 80 bp, synthetic construct
  source 1..80: mol_type = other DNA
ctatgaagtttgttatttctgagccaccattatctagtgggttttcccaagaaattgtacagttctctttggttacattg

SEQ ID NO: 110349 - DNA, 80 bp, synthetic construct
  source 1..80: mol_type = other DNA
taaggtccaccctcttttctcggaccaatactttgccttccttagtccaagttatgtctggttcaggtctgcctttgact

SEQ ID NO: 110350 - DNA, 80 bp, synthetic construct; identical to SEQ ID NO: 21595
  source 1..80: mol_type = other DNA

SEQ ID NO: 110351 - DNA, 80 bp, synthetic construct
  source 1..80: mol_type = other DNA
aagcttttattggatcagaacttggggatggtttgcttagtcctgcaagattttcagcaaaaactctaaactcatatgta

SEQ ID NO: 110352 - DNA, 80 bp, synthetic construct
  source 1..80: mol_type = other DNA
tttcagtaatgtcagtaaccactggtttaccaggaggagacggaggactaaatttatgcttagcaacagtaggtgtggag

SEQ ID NO: 110353 - DNA, 80 bp, synthetic construct; identical to SEQ ID NO: 21596
  source 1..80: mol_type = other DNA

SEQ ID NO: 110354 - DNA, 80 bp, synthetic construct
  source 1..80: mol_type = other DNA
tgtgatttgatattccccagtgtctctccttaagcagttcttaatggtaagtactgatgagaagttgtctgtttcaactg

SEQ ID NO: 110355 - DNA, 80 bp, synthetic construct
  source 1..80: mol_type = other DNA
caattaatttcacatctagctccacggatggaggcactgaaaagtaaacatgaaaaaattagattttgattttcacctat

SEQ ID NO: 110356 - DNA, 80 bp, synthetic construct
  source 1..80: mol_type = other DNA
accacacactctaagtttgtcacagtcttaaatttaatccagtcctgggtgccttcttcttgatattctaccaaatatcc

SEQ ID NO: 110357 - DNA, 80 bp, synthetic construct
  source 1..80: mol_type = other DNA
tagttttgtattcagagaaagcaacttacggagaggatccaaagccttgattggttttggtgtttcaacaaaaggaccac

SEQ ID NO: 110358 - DNA, 80 bp, synthetic construct; identical to SEQ ID NO: 21597
  source 1..80: mol_type = other DNA

SEQ ID NO: 110359 - DNA, 80 bp, synthetic construct
  source 1..80: mol_type = other DNA
actgttaaagaataaattccaccatcttcatgggcagcattacgaatttcaagcttgctaccaactggagtcacatcaat

SEQ ID NO: 110360 - DNA, 80 bp, synthetic construct
  source 1..80: mol_type = other DNA
aagagaacagaacactcagatttgatccataatgcagattacaattaaacacatacaatcagacatctattttccttgca

SEQ ID NO: 110361 - DNA, 80 bp, synthetic construct; identical to SEQ ID NO: 21598
  source 1..80: mol_type = other DNA

SEQ ID NO: 110362 - DNA, 80 bp, synthetic construct
  source 1..80: mol_type = other DNA
tgaataaatccattaatactataccaattggatctttagcaaagactggtttggatggtgggcttggatctccaatacca

SEQ ID NO: 110363 - DNA, 80 bp, synthetic construct
  source 1..80: mol_type = other DNA
gtttctctcttttccaggatgtagtttgtgatgggttttcctccatcatgtggcttattccaggttactaatgcagagtc

SEQ ID NO: 110364 - DNA, 80 bp, synthetic construct
  source 1..80: mol_type = other DNA
aaagaaacataatgcatactgaaacgatctttggctttcattgaatcagacaccagaggatcacttattccatacagatt

SEQ ID NO: 110365 - DNA, 80 bp, synthetic construct
  source 1..80: mol_type = other DNA
aataatataattggtgattttactgcctccatcatctaaaggaggcttccaagagataaccatgtaatctttggtcacct

SEQ ID NO: 110366 - DNA, 80 bp, synthetic construct; identical to SEQ ID NO: 21599
  source 1..80: mol_type = other DNA

SEQ ID NO: 110367 - DNA, 80 bp, synthetic construct
  source 1..80: mol_type = other DNA
caccaactcgaatcgtgagcttatctctgaagtcgaggtgaagcgttgggggtgctaaaatttgtaattataaaggcaag

SEQ ID NO: 110368 - DNA, 80 bp, synthetic construct
  source 1..80: mol_type = other DNA
tgccttgtccaacaatgttgacagcactgacacggtactcataggtatcaccttcttttaagcctttaacagtgtatttt

SEQ ID NO: 110369 - DNA, 80 bp, synthetic construct; identical to SEQ ID NO: 21600
  source 1..80: mol_type = other DNA

SEQ ID NO: 110370 - DNA, 80 bp, synthetic construct
  source 1..80: mol_type = other DNA
caaaataatttaggaaaggtcttcagaattggtagttttagaagtaggaaaataattcagtttctattaatgccattaag

SEQ ID NO: 110371 - DNA, 80 bp, synthetic construct
  source 1..80: mol_type = other DNA
agaaatagaaaaattagctgggcatggtggtgcatgtctgtaatcccagctactcgggagactgagacacaagaatcact

SEQ ID NO: 110372 - DNA, 80 bp, synthetic construct
  source 1..80: mol_type = other DNA
ctgtccaaatactaccaaatcagatactgagtagttgtgtgataactgcttgtcaagtgaatgaaatgtacggcatttat

SEQ ID NO: 110373 - DNA, 80 bp, synthetic construct; identical to SEQ ID NO: 21601
  source 1..80: mol_type = other DNA

SEQ ID NO: 110374 - DNA, 80 bp, synthetic construct
  source 1..80: mol_type = other DNA
ttccaacgggacctggaacatctggaaataagaagaaaataattcaagctgtttgccttcaatgaaagataatgctcaac

SEQ ID NO: 110375 - DNA, 80 bp, synthetic construct
  source 1..80: mol_type = other DNA
cacccaggctggagttcagtggcacaatctcagctcactgcaacctccgcttcccaggttcaagcaattctcctgcctca

SEQ ID NO: 110376 - DNA, 80 bp, synthetic construct
  source 1..80: mol_type = other DNA
gtgtgagccatagcatcaagccccatatttgttaatgaagtaggtttgcaacagttattggttaccatggttttagtaga

SEQ ID NO: 110377 - DNA, 80 bp, synthetic construct; identical to SEQ ID NO: 21602
  source 1..80: mol_type = other DNA

SEQ ID NO: 110378 - DNA, 80 bp, synthetic construct
  source 1..80: mol_type = other DNA
gcaattttcacataaaaactgtggctggagtattgttgtgcctagagacatgcttagaaagagccctgagtggaaaggct

SEQ ID NO: 110379 - DNA, 80 bp, synthetic construct
  source 1..80: mol_type = other DNA
gcattattatgataatttagcgataggggtagagtctcatgatgtgaaatggtcagcactggcaaattgttaaacattca

SEQ ID NO: 110380 - DNA, 80 bp, synthetic construct
  source 1..80: mol_type = other DNA
ggccttctagcaatttgagaattgtgtacatgcactctttaggttcactggaaacatggatgcatgtcttcttgttagca

SEQ ID NO: 110381 - DNA, 80 bp, synthetic construct; identical to SEQ ID NO: 21603
  source 1..80: mol_type = other DNA

SEQ ID NO: 110382 - DNA, 80 bp, synthetic construct
  source 1..80: mol_type = other DNA
acactggcatctagctgaaggtcaggtgaaactggaagcaattgaaaattacaaatgtgatttttccccttcaatctgaa

SEQ ID NO: 110383 - DNA, 80 bp, synthetic construct
  source 1..80: mol_type = other DNA
atttgtagaatgctccttcctttaatcctgtcacaacaagctttgttcctctcacttctttatctttaccctggggagaa

SEQ ID NO: 110384 - DNA, 80 bp, synthetic construct
  source 1..80: mol_type = other DNA
ttggcaggagttatgctttaaaattattgtcaaatgattaaaccttgatttatttattccacattccagggtttataacc

SEQ ID NO: 110385 - DNA, 80 bp, synthetic construct
  source 1..80: mol_type = other DNA
attcatagtgcatttccttagtgccaagttttcctaccttttcccattcttcttttccttcttctttatattcaacgatg

SEQ ID NO: 110386 - DNA, 80 bp, synthetic construct; identical to SEQ ID NO: 21604
  source 1..80: mol_type = other DNA

SEQ ID NO: 110387 - DNA, 80 bp, synthetic construct
  source 1..80: mol_type = other DNA
agaaacacccaaagtcatggctttgataggatctcggttaactctcttccatctctttgaagtggtgtctttcatttcca

SEQ ID NO: 110388 - DNA, 80 bp, synthetic construct
  source 1..80: mol_type = other DNA
aaaatggctttgtatgtgaaaatgttctcctacttacagaagaggtttcttgctgtttcaggttcactgtcaagaggttc

SEQ ID NO: 110389 - DNA, 80 bp, synthetic construct; identical to SEQ ID NO: 21605
  source 1..80: mol_type = other DNA

SEQ ID NO: 110390 - DNA, 80 bp, synthetic construct
  source 1..80: mol_type = other DNA
tttacccaggacattcagtctcatctcctttgatgctgttcccagattatttacagctgtgatggtatataagccagtgt

SEQ ID NO: 110391 - DNA, 80 bp, synthetic construct
  source 1..80: mol_type = other DNA
aatgttaacattggttccttcttcaacctccatgaattcttttagatcaattgatggtgggcctagattatttaaaaaaa

SEQ ID NO: 110392 - DNA, 80 bp, synthetic construct
  source 1..80: mol_type = other DNA
gggtcagcatcttttattggatctacatgtggctatgtatctgtgcttgcctcactttatttggcatcattatgcatgta

SEQ ID NO: 110393 - DNA, 80 bp, synthetic construct
  source 1..80: mol_type = other DNA
ggaaagcaattttccattttgcacaaatttaggacagaaatattcaaagagggtagtgactacagtttcttcacacttag

SEQ ID NO: 110394 - DNA, 80 bp, synthetic construct; identical to SEQ ID NO: 21606
  source 1..80: mol_type = other DNA

SEQ ID NO: 110395 - DNA, 80 bp, synthetic construct
  source 1..80: mol_type = other DNA
agcttcctaaggtacagatatagctcttttaattgtgaactattattgaacacctaggaaggcagctgtaaggaggacat

SEQ ID NO: 110396 - DNA, 80 bp, synthetic construct
  source 1..80: mol_type = other DNA
catcacgcttattgcactgcctccaggcttctttctttgtcccagtagggtcccatgcaaggcactcaacaatatagtgg

SEQ ID NO: 110397 - DNA, 80 bp, synthetic construct
  source 1..80: mol_type = other DNA
tgagaagatattttaaatttagattttaaagcttacatatcggatctctggcagtggtcctctgaatggtttccacaggt

SEQ ID NO: 110398 - DNA, 80 bp, synthetic construct; identical to SEQ ID NO: 21607
  source 1..80: mol_type = other DNA

SEQ ID NO: 110399 - DNA, 80 bp, synthetic construct
  source 1..80: mol_type = other DNA
actctgcaatttgcagtcttttgtcctgctttattcttggctgtgatgctgtatttgcctgtatgagatcgtttacactc

SEQ ID NO: 110400 - DNA, 80 bp, synthetic construct
  source 1..80: mol_type = other DNA
attatttttttacctgtgcatcttcgggtatgtcatgaactccatcctattagaaaaggagacagtcagttgtagtataa

SEQ ID NO: 110401 - DNA, 80 bp, synthetic construct
  source 1..80: mol_type = other DNA
gacagtcctgtgctccaatgtcaatgaaaacttctggttcctctgtaataccacatacaatttaacaggatttagctcat

SEQ ID NO: 110402 - DNA, 80 bp, synthetic construct; identical to SEQ ID NO: 21608
  source 1..80: mol_type = other DNA

SEQ ID NO: 110403 - DNA, 80 bp, synthetic construct
  source 1..80: mol_type = other DNA
ttttatctttaacttctgggcaagaaggtggccccggtggaactaataacaaaagaaaaaaaaaagcttcatcagatttt

SEQ ID NO: 110404 - DNA, 80 bp, synthetic construct
  source 1..80: mol_type = other DNA
aggaaatggtctattttcctttagcattaatgcaaaaacagagaaagcaaacaactaactgggaatagaaagactacttc

SEQ ID NO: 110405 - DNA, 80 bp, synthetic construct; identical to SEQ ID NO: 21609
  source 1..80: mol_type = other DNA

SEQ ID NO: 110406 - DNA, 80 bp, synthetic construct
  source 1..80: mol_type = other DNA
atatatgctccacatagcacttgagtatttaaaattttctttttaacaaataattgaatttttcttctatagagaatcta

SEQ ID NO: 110407 - DNA, 80 bp, synthetic construct
  source 1..80: mol_type = other DNA
agctaacaacattctgttttttgttgaattcctactggaaggtctgactgtttagtgggagagatgatttccccagtatc

SEQ ID NO: 110408 - DNA, 80 bp, synthetic construct
  source 1..80: mol_type = other DNA
tacacacataaatatatacttccgatagtctatgtgaacatgaaccttttttattttaataaataaaataatttggcata

SEQ ID NO: 110409 - DNA, 80 bp, synthetic construct; identical to SEQ ID NO: 21610
  source 1..80: mol_type = other DNA

SEQ ID NO: 110410 - DNA, 80 bp, synthetic construct
  source 1..80: mol_type = other DNA
aaggcgataaggatcttgaatgactactttatctgatttgcactcatcactgattccatatttattcactgccctgactc

SEQ ID NO: 110411 - DNA, 80 bp, synthetic construct
  source 1..80: mol_type = other DNA
acatgggaagacagagaaaaggagaaagctttttttaaaataaaaatatgtagatgtattgtacctgatagtggatctca

SEQ ID NO: 110412 - DNA, 80 bp, synthetic construct
  source 1..80: mol_type = other DNA
acttttaatgtgtataagaaaatattcagaagagtttaccccatatcttttctctacagcagtgttggtgacttcctccc

SEQ ID NO: 110413 - DNA, 80 bp, synthetic construct
  source 1..80: mol_type = other DNA
atcaacagagaatattgagaaggcaattcttaaacagacactggatgcctttttgatgtaagaaagcaagtcacttacca

SEQ ID NO: 110414 - DNA, 80 bp, synthetic construct; identical to SEQ ID NO: 21611
  source 1..80: mol_type = other DNA

SEQ ID NO: 110415 - DNA, 80 bp, synthetic construct
  source 1..80: mol_type = other DNA
ttattattatattcagattccgcaccttcatcatcttgtatgactacattaagaggtagggatggttcactttcaccaat

SEQ ID NO: 110416 - DNA, 80 bp, synthetic construct
  source 1..80: mol_type = other DNA
ttactgcggggctctttccagtcaagtgtgatagtggactttgtcctttcagtgtatgtgagcctctctggagatgttgg

SEQ ID NO: 110417 - DNA, 80 bp, synthetic construct
  source 1..80: mol_type = other DNA
aaattatagacattcatgtagacagaatttttcttagcaaacttttcatcaagattatcagtgaaaaataaatcaagggc

SEQ ID NO: 110418 - DNA, 80 bp, synthetic construct; identical to SEQ ID NO: 21612
  source 1..80: mol_type = other DNA

SEQ ID NO: 110419 - DNA, 80 bp, synthetic construct
  source 1..80: mol_type = other DNA
agctgcagcagtgatataggatgtatttttttttttcagggggtgatggtgaaggaataagttcttctgtctcttgagga

SEQ ID NO: 110420 - DNA, 80 bp, synthetic construct
  source 1..80: mol_type = other DNA
ttggaggctgtttctggttttgggcctctctatccttccagtatggggactttttgaatatagaggaagactaaggcatt

SEQ ID NO: 110421 - DNA, 80 bp, synthetic construct
  source 1..80: mol_type = other DNA
ctacttctaggttattattaagcccctgtagatccaagtttttcagtacaagaaaccatgcatgattaatatacttacag

SEQ ID NO: 110422 - DNA, 80 bp, synthetic construct; identical to SEQ ID NO: 21613
  source 1..80: mol_type = other DNA

SEQ ID NO: 110423 - DNA, 80 bp, synthetic construct
  source 1..80: mol_type = other DNA
atcatcttctggatcagaccagttaagtagacacatttttctgtttgttacaacaggttttaagtcaagaactggaccag

SEQ ID NO: 110424 - DNA, 80 bp, synthetic construct
  source 1..80: mol_type = other DNA
tttggaaccacagctatttgtagctgtaatcacatatctgccatggtcttttcgcagtgcatccttgataattagttcag

SEQ ID NO: 110425 - DNA, 80 bp, synthetic construct
  source 1..80: mol_type = other DNA
ttccacagctggaggctctgttgaaagagaacagtcatgcattagcccatgaaagattaaaaaatagtcccatatagaga

SEQ ID NO: 110426 - DNA, 80 bp, synthetic construct; identical to SEQ ID NO: 21614
  source 1..80: mol_type = other DNA

SEQ ID NO: 110427 - DNA, 80 bp, synthetic construct
  source 1..80: mol_type = other DNA
ctccaccttcttcttaaggaactacttacagattggatcatgtgctgttttgggatctgaaggtggactgaactttccag

SEQ ID NO: 110428 - DNA, 80 bp, synthetic construct
  source 1..80: mol_type = other DNA
tccattatcttttggttcattccatttcactagcatactgttgctggtaacatcttccacaatgggcttatctggtgcat

SEQ ID NO: 110429 - DNA, 80 bp, synthetic construct
  source 1..80: mol_type = other DNA
tgccaaaggaaacttaccaaatggatctttagccacaagtggctttgaaacacatggtggacctggcccaaatctgtttt

SEQ ID NO: 110430 - DNA, 80 bp, synthetic construct; identical to SEQ ID NO: 21615
  source 1..80: mol_type = other DNA

SEQ ID NO: 110431 - DNA, 80 bp, synthetic construct
  source 1..80: mol_type = other DNA
acatggccagcagataaaatatgattgaggataacttgctgaagctatgtcccatttcttttaactctctcccaaacttt

SEQ ID NO: 110432 - DNA, 80 bp, synthetic construct
  source 1..80: mol_type = other DNA
agctgagattctccctttttgctgttgtcaatactcaaacgctgtgtcagaggcaggacaaatggttcttcttcttgaac

SEQ ID NO: 110433 - DNA, 80 bp, synthetic construct; identical to SEQ ID NO: 21616
  source 1..80: mol_type = other DNA

SEQ ID NO: 110434 - DNA, 80 bp, synthetic construct
  source 1..80: mol_type = other DNA
tctgctcgcacacggaattggtactctttcccctcttcaagtccttttgctgtataggtcaggattggtaccaggtgttc

SEQ ID NO: 110435 - DNA, 80 bp, synthetic construct
  source 1..80: mol_type = other DNA
attatgaacctctacatctacaggtggatcagggggttctgaagaacaagaaaaaaatgttagtatcaggaaaaccacct

SEQ ID NO: 110436 - DNA, 80 bp, synthetic construct
  source 1..80: mol_type = other DNA
gtatgagatccttcacagtccatgacagtttgttctcaccagacatgactggtatatatgttctcctcccagcttctctg

SEQ ID NO: 110437 - DNA, 80 bp, synthetic construct
  source 1..80: mol_type = other DNA
aatcagcattttaataatgcacttgtctctaagtggggctatctgtattttgggtaggataatctttgatgtgctggagt

SEQ ID NO: 110438 - DNA, 80 bp, synthetic construct; identical to SEQ ID NO: 21617
  source 1..80: mol_type = other DNA

SEQ ID NO: 110439 - DNA, 80 bp, synthetic construct
  source 1..80: mol_type = other DNA
tttagaattgttttacttctcctatggaaagacataatcagaagtgacatttagtttacaagtggccagttcatgaagcc

SEQ ID NO: 110440 - DNA, 80 bp, synthetic construct
  source 1..80: mol_type = other DNA
tgcacggacactcttgggaacttcaaggtgtgcagagatgtgatcattcttcattgttaatctatcacttgctttaactt

SEQ ID NO: 110441 - DNA, 80 bp, synthetic construct
  source 1..80: mol_type = other DNA
tgtcaaaatgcaatgcatgaataaagggtattttattaactataaaagaccttgtgctcttacagtctgggtctttggca

SEQ ID NO: 110442 - DNA, 80 bp, synthetic construct; identical to SEQ ID NO: 21618
  source 1..80: mol_type = other DNA

SEQ ID NO: 110443 - DNA, 80 bp, synthetic construct
  source 1..80: mol_type = other DNA
actacttacttgttggatcttcaatggataggatttctgtgggttcacttgggtggccaactccagcttcattttcagcc

SEQ ID NO: 110444 - DNA, 80 bp, synthetic construct
  source 1..80: mol_type = other DNA
tgaaaaaacacagttaagaatttgcagccaagtgtaagttattctttatgaattaattcaaattctacctctgtattggt

SEQ ID NO: 110445 - DNA, 80 bp, synthetic construct; identical to SEQ ID NO: 21619
  source 1..80: mol_type = other DNA

SEQ ID NO: 110446 - DNA, 80 bp, synthetic construct
  source 1..80: mol_type = other DNA
agttggtgatgggggaccctccatctttctcaggaactgtccattttaggtctgctgtattttttgtgatattaataact

SEQ ID NO: 110447 - DNA, 80 bp, synthetic construct
  source 1..80: mol_type = other DNA
atatcgtagctcacaggcagatattagaagaatttatatatcccagacatcaagagtgacttacatagcttctcccggca

SEQ ID NO: 110448 - DNA, 80 bp, synthetic construct
  source 1..80: mol_type = other DNA
agcatttcaatgacataagactcaatctttgcacctccatcatgttctggttttgtccaattcaaccttactgatgtttt

SEQ ID NO: 110449 - DNA, 80 bp, synthetic construct; identical to SEQ ID NO: 21620
  source 1..80: mol_type = other DNA

SEQ ID NO: 110450 - DNA, 80 bp, synthetic construct
  source 1..80: mol_type = other DNA
tttttaactgccacacactttagactgggccaaacataccaatctaattataatatctatgacagtggtcattatcataa

SEQ ID NO: 110451 - DNA, 80 bp, synthetic construct
  source 1..80: mol_type = other DNA
atctgtaatcccaaggaatactaaagagtaaacatttgaatatactgctgtcttaacatcttgatggggattctgagcat

SEQ ID NO: 110452 - DNA, 80 bp, synthetic construct
  source 1..80: mol_type = other DNA
ttctaggcgagttggaggaccaggtggatctatagacaggataatggtgtaaaatgttatatgtcctgtatataaatatg

SEQ ID NO: 110453 - DNA, 80 bp, synthetic construct; identical to SEQ ID NO: 21621
  source 1..80: mol_type = other DNA

SEQ ID NO: 110454 - DNA, 80 bp, synthetic construct
  source 1..80: mol_type = other DNA
acatctgtgatgtcaaaggcagctggtggtccgggtttatctgtgtatggcattacagatgcagaaaaaaaaattgttca

SEQ ID NO: 110455 - DNA, 80 bp, synthetic construct
  source 1..80: mol_type = other DNA
attcacagcctcaatgatatatgtgccagtgtcacttctcttactatcaacaatagtcactgtggatttcttagggacat

SEQ ID NO: 110456 - DNA, 80 bp, synthetic construct
  source 1..80: mol_type = other DNA
tgagaccagcaaggagcttcacatcgaggaagatttctggggcctctgaattggaaaagattatttatgatgttatcaag

SEQ ID NO: 110457 - DNA, 80 bp, synthetic construct
  source 1..80: mol_type = other DNA
caagacctgtcacttccattctgtcagaaaacagaataggatgttttactgtgatgtcgataatcgtttcattgtgtagt

SEQ ID NO: 110458 - DNA, 80 bp, synthetic construct; identical to SEQ ID NO: 21622
  source 1..80: mol_type = other DNA

SEQ ID NO: 110459 - DNA, 80 bp, synthetic construct
  source 1..80: mol_type = other DNA
gtgaaccaccatcatttttaggtggatcccatgttaagaagatgctattggctgttcgatctctccatttaacattctct

SEQ ID NO: 110460 - DNA, 80 bp, synthetic construct
  source 1..80: mol_type = other DNA
gaatgtactcacttgcaggagttgacatatttacaggttcatcaacatatgcaggttctccagggccacatttgttacga

SEQ ID NO: 110461 - DNA, 80 bp, synthetic construct
  source 1..80: mol_type = other DNA
atacaaactgcagttgttttgaatgctagggattattcttacattaatttcatattagggaaaattgcaaagtaggatac

SEQ ID NO: 110462 - DNA, 80 bp, synthetic construct; identical to SEQ ID NO: 21623
  source 1..80: mol_type = other DNA

SEQ ID NO: 110463 - DNA, 80 bp, synthetic construct
  source 1..80: mol_type = other DNA
gtttttgtacattttcagtgaggtaaaggtaagaagttgtagcacataagacttttgtatggcatcccaaccttctggga

SEQ ID NO: 110464 - DNA, 80 bp, synthetic construct
  source 1..80: mol_type = other DNA
ttatatcaccaaatttcaattctttgggtgcacttgggcgagctgaaaaaaaatgcactcacgagtcactgttaatagtc

SEQ ID NO: 110465 - DNA, 80 bp, synthetic construct
  source 1..80: mol_type = other DNA
aagttcggcataggcagacaaggtcttcattttcacccggtcccctgtttctagtactttatctccaaaacaccaggttg

SEQ ID NO: 110466 - DNA, 80 bp, synthetic construct; identical to SEQ ID NO: 21624
  source 1..80: mol_type = other DNA

SEQ ID NO: 110467 - DNA, 80 bp, synthetic construct
  source 1..80: mol_type = other DNA
tatgcaaatgacctaccttgtaagtcagttcagggacaagtttcatattgcaacgaatccaattatcttttccttcttcg

SEQ ID NO: 110468 - DNA, 80 bp, synthetic construct
  source 1..80: mol_type = other DNA
ctctctggaataaaagaaggagttggagcataccatttacgttagtgacaatttatgaaaacagtgttgtaatcaattat

SEQ ID NO: 110469 - DNA, 80 bp, synthetic construct; identical to SEQ ID NO: 21625
  source 1..80: mol_type = other DNA

SEQ ID NO: 110470 - DNA, 80 bp, synthetic construct
  source 1..80: mol_type = other DNA
gtcttgtctcttaattcaatgacgtagtttgtgatctcagcacctccatcatactctggtggttcccatgtcagtgagac

SEQ ID NO: 110471 - DNA, 80 bp, synthetic construct
  source 1..80: mol_type = other DNA
catatttactccttgcttctacaggattgtcagtttctactggctcaccagtgccaactctgtttcttgcactcacacgg

SEQ ID NO: 110472 - DNA, 80 bp, synthetic construct
  source 1..80: mol_type = other DNA
atgattttgcttccaccatcagttaaaggttcttcccaagcaaggctcacttcaccatcaaatgtttctgtcacttctaa

SEQ ID NO: 110473 - DNA, 80 bp, synthetic construct
  source 1..80: mol_type = other DNA
tctgaagcacaattttatacctccctttgtctcctttcttggcttctaaaattctgaaagaagtttgttcagccgtagta

SEQ ID NO: 110474 - DNA, 80 bp, synthetic construct; identical to SEQ ID NO: 21626
  source 1..80: mol_type = other DNA

SEQ ID NO: 110475 - DNA, 80 bp, synthetic construct
  source 1..80: mol_type = other DNA
gtgcgtgcaaattagattggagagtagaggattgagaatggcataaaatcataagacatgcattccttgccaaaaatagt

SEQ ID NO: 110476 - DNA, 80 bp, synthetic construct
  source 1..80: mol_type = other DNA
aggatgagaacatacctaaaaggcacacaggggtttgtaaagtaggagagtataagaccgtctttagatttgccaagact

SEQ ID NO: 110477 - DNA, 80 bp, synthetic construct
  source 1..80: mol_type = other DNA
gggcttgctagaaatgaaagaccctcacaaggattacctcattaaataactgtgaaatctgaaatctaaactctgtgata

SEQ ID NO: 110478 - DNA, 80 bp, synthetic construct; identical to SEQ ID NO: 21627
  source 1..80: mol_type = other DNA

SEQ ID NO: 110479 - DNA, 80 bp, synthetic construct
  source 1..80: mol_type = other DNA
ttccacaaaaagtctagcacgagacttcctgtcttctaccccgcaagcatattcacactcatcatccagcctgcaatctt

SEQ ID NO: 110480 - DNA, 80 bp, synthetic construct
  source 1..80: mol_type = other DNA
ttgatttctctcccatttctgtaccattttacattggctttctctctggagagctggcaggagaagacagcgtcatcgaa

SEQ ID NO: 110481 - DNA, 80 bp, synthetic construct; identical to SEQ ID NO: 21628
  source 1..80: mol_type = other DNA

SEQ ID NO: 110482 - DNA, 80 bp, synthetic construct
  source 1..80: mol_type = other DNA
acttaccttctactattagattggctgcacttttaacattttcacctctgtgattggtcaaagacacattatagttggct

SEQ ID NO: 110483 - DNA, 80 bp, synthetic construct
  source 1..80: mol_type = other DNA
ccttcacccgggtgtccttaagaggaactacgatcctgagtttttctgaaagcaaccgacaagactttatagtatgaata

SEQ ID NO: 110484 - DNA, 80 bp, synthetic construct
  source 1..80: mol_type = other DNA
ctaggaccctctttttaccatcagcaataacgtcatatttatctccagattcaagtgtcttatcatccctcttccactgg

SEQ ID NO: 110485 - DNA, 80 bp, synthetic construct
  source 1..80: mol_type = other DNA
gtgtgaattgttagaaataaaagattattcactgtagttttcataccatgtactttgactttgccatcggttcgagagct

SEQ ID NO: 110486 - DNA, 80 bp, synthetic construct; identical to SEQ ID NO: 21629
  source 1..80: mol_type = other DNA

SEQ ID NO: 110487 - DNA, 80 bp, synthetic construct
  source 1..80: mol_type = other DNA
tttactcttacccagaactgtcagcatgccagaagttctcgctgtccttacttcacaggaatattcagcttcatcatcca

SEQ ID NO: 110488 - DNA, 80 bp, synthetic construct
  source 1..80: mol_type = other DNA
agaaaaactatgatcctgagtttttctgaaagcaaccaacaagacttcatagtgtgaagaagaaccaaggtggcagacac

SEQ ID NO: 110489 - DNA, 80 bp, synthetic construct; identical to SEQ ID NO: 21630
  source 1..80: mol_type = other DNA

SEQ ID NO: 110490 - DNA, 80 bp, synthetic construct
  source 1..80: mol_type = other DNA
agcaattaaagtcaagaatacattttatactacaattatctttaaaagtaaagtggtgaccagagaagttgtgactaact

SEQ ID NO: 110491 - DNA, 80 bp, synthetic construct
  source 1..80: mol_type = other DNA
aagaattccacatgaggagctgtaagagaatgtcatcagaattcaaaatgaggtttctggaaatttactctgacattacc

SEQ ID NO: 110492 - DNA, 80 bp, synthetic construct
  source 1..80: mol_type = other DNA
aactagtgtgcatgtgtgtgtgtacagtatatatactagggagccatctcagttcttttgaataatagctggaggaaaaa

SEQ ID NO: 110493 - DNA, 80 bp, synthetic construct
  source 1..80: mol_type = other DNA
tatggctaagaggcatgaggctgtaattgaaacatacatttagctttttaaaaaaatcagctttgaagacgtcacatata

SEQ ID NO: 110494 - DNA, 80 bp, synthetic construct; identical to SEQ ID NO: 21631
  source 1..80: mol_type = other DNA

SEQ ID NO: 110495 - DNA, 80 bp, synthetic construct
  source 1..80: mol_type = other DNA
agatgcatgaagcacagagtcactaggttgtagctgttgacagatgggaagcaaccaaaccaaacaaacaaatattgcac

SEQ ID NO: 110496 - DNA, 80 bp, synthetic construct
  source 1..80: mol_type = other DNA
accattagagttctcttcattcaaagagtccaggactcaaaagatccagggcctcactccatcttcttatccattcttat

SEQ ID NO: 110497 - DNA, 80 bp, synthetic construct
  source 1..80: mol_type = other DNA
attaggactccctacttatctttaaaattcagtttctcctcatccatatcaggatatccatacagtaggctgaccccatg

SEQ ID NO: 110498 - DNA, 80 bp, synthetic construct; identical to SEQ ID NO: 21632
  source 1..80: mol_type = other DNA

SEQ ID NO: 110499 - DNA, 80 bp, synthetic construct
  source 1..80: mol_type = other DNA
taacaagttttctgaccctgccatcagcaacaatttcatacttcttgcttttgaggatttctgtcccatttttgaaccat

SEQ ID NO: 110500 - DNA, 80 bp, synthetic construct
  source 1..80: mol_type = other DNA
accttctcaactttcccctgccatctccagggctttgttctgtcctaagttttattttcaagttttgattacactcagac

SEQ ID NO: 110501 - DNA, 80 bp, synthetic construct; identical to SEQ ID NO: 21633
  source 1..80: mol_type = other DNA

SEQ ID NO: 110502 - DNA, 80 bp, synthetic construct
  source 1..80: mol_type = other DNA
agcctctgccttatacatgtttttaaaataagccttgtaattacctttcacaaagaggttggcgtgagttttgaaatctt

SEQ ID NO: 110503 - DNA, 80 bp, synthetic construct
  source 1..80: mol_type = other DNA
aaataaatggaaatagagctttccaagttgttttataatcatctatttagcacgtatgcattcaaaaatcatttcaacca

SEQ ID NO: 110504 - DNA, 80 bp, synthetic construct
  source 1..80: mol_type = other DNA
aatcatgctgctgtaaagacacatgcacacgtatgtttattgtggcattattcacaatagcaaagacttggaaccaaccc

SEQ ID NO: 110505 - DNA, 80 bp, synthetic construct; identical to SEQ ID NO: 21634
  source 1..80: mol_type = other DNA

SEQ ID NO: 110506 - DNA, 80 bp, synthetic construct
  source 1..80: mol_type = other DNA
atgtaaggtgtttgccatgcaacaacaagctataactcttcttcccatttattttagcaattaaacttattttgcaaacc

SEQ ID NO: 110507 - DNA, 80 bp, synthetic construct
  source 1..80: mol_type = other DNA
taagagacttgggggttcttccagttctatgatataaaattcctaagaagctgtgccctgtcatccagactgattttgca

SEQ ID NO: 110508 - DNA, 80 bp, synthetic construct; identical to SEQ ID NO: 21635
  source 1..80: mol_type = other DNA

SEQ ID NO: 110509 - DNA, 80 bp, synthetic construct
  source 1..80: mol_type = other DNA
atctgagttcctctgtagctactctaggacactgctcagaatgcagtatgtctcaataaacagcttgtatacaatctacc

SEQ ID NO: 110510 - DNA, 80 bp, synthetic construct
  source 1..80: mol_type = other DNA
atttatttatagtggaagcatattaatataatacggtaggcttatgaccatgacaaaactattaaagttttgtatttaaa

SEQ ID NO: 110511 - DNA, 80 bp, synthetic construct; identical to SEQ ID NO: 21636
  source 1..80: mol_type = other DNA

SEQ ID NO: 110512 - DNA, 80 bp, synthetic construct
  source 1..80: mol_type = other DNA
cgggtgcctagagtaaaggattaaaattcctatgccaaaagagatgtaaaggggccctatagaattatagtaaactgatc

SEQ ID NO: 110513 - DNA, 80 bp, synthetic construct
  source 1..80: mol_type = other DNA
tatttggtaatgaaaaaataatatcatttgtctttaagcagtgttcctatatataaatcatgaatttgcagatctagaaa

SEQ ID NO: 110514 - DNA, 80 bp, synthetic construct
  source 1..80: mol_type = other DNA
atgtaacttaattcccatgctacaaatggaatgtactgctgctttttctggtcactggaaaaggagaccaagaagatctt

SEQ ID NO: 110515 - DNA, 80 bp, synthetic construct
  source 1..80: mol_type = other DNA
gctgtggctttttgttaaactgaatcactttttaattatattcctttaagtcttcaaagtttgatttttgttgagatctt

SEQ ID NO: 110516 - DNA, 80 bp, synthetic construct; identical to SEQ ID NO: 21637
  source 1..80: mol_type = other DNA

SEQ ID NO: 110517 - DNA, 80 bp, synthetic construct
  source 1..80: mol_type = other DNA
cttgcattccagatatcgcacagcccagagcacttgaaggttaaaaatagctttggagaaatgcttgaagagcaaatctg

SEQ ID NO: 110518 - DNA, 80 bp, synthetic construct
  source 1..80: mol_type = other DNA
gtgcaccatggctgcagagcgtgcaatcagaaagcctttttgatccttcctgccttctggttaatcaaactatcattcat

SEQ ID NO: 110519 - DNA, 80 bp, synthetic construct; identical to SEQ ID NO: 21638
  source 1..80: mol_type = other DNA

SEQ ID NO: 110520 - DNA, 80 bp, synthetic construct
  source 1..80: mol_type = other DNA
gaccaattactcgtgcttttcgagagggaagaaacagctttgcgttactcattttgtaatcccaaaagaataaatagaga

SEQ ID NO: 110521 - DNA, 80 bp, synthetic construct
  source 1..80: mol_type = other DNA
agcgagaaatctgtgctgcatctgtctctctgccaggcgtcaagttcttcttgctacataaggtatgtgacttccaaaat

SEQ ID NO: 110522 - DNA, 80 bp, synthetic construct
  source 1..80: mol_type = other DNA
agttgcacagccacttgagggaagtggtctttaagggttctgagttagattctcattgtatgtgtatctactttcaatga

SEQ ID NO: 110523 - DNA, 80 bp, synthetic construct
  source 1..80: mol_type = other DNA
tacgatttgaaccacttctgtattggaatgtcaaagtggcaaatacaagagagccagtttttgtgttttaataatatttt

SEQ ID NO: 110524 - DNA, 80 bp, synthetic construct; identical to SEQ ID NO: 21639
  source 1..80: mol_type = other DNA

SEQ ID NO: 110525 - DNA, 80 bp, synthetic construct
  source 1..80: mol_type = other DNA
ttagctgtataattctgagccaactagcagcatcacagagtatctacaaccttatactcactctgctggatcaaaagtaa

SEQ ID NO: 110526 - DNA, 80 bp, synthetic construct
  source 1..80: mol_type = other DNA
cttttctaattcacacagctcctttaggtgttgacaagttcagaaatagccttacaggtgtttggagtagggcctctccc

SEQ ID NO: 110527 - DNA, 80 bp, synthetic construct; identical to SEQ ID NO: 21640
  source 1..80: mol_type = other DNA

SEQ ID NO: 110528 - DNA, 80 bp, synthetic construct
  source 1..80: mol_type = other DNA
actgtagaataacttcatctttctctacaccagtataatcttgaagttttcctgtaaaatatgggtctccctctgcaagt

SEQ ID NO: 110529 - DNA, 80 bp, synthetic construct
  source 1..80: mol_type = other DNA
ttaacctgtttatgttcaaaagttctctaaatattaggaagggaatcagtgtgtgggatttatcaagatctaatccattc

SEQ ID NO: 110530 - DNA, 80 bp, synthetic construct
  source 1..80: mol_type = other DNA
tttcttaatcaattaatagtttgcctttaatcatgtctatatatgttagccttcatgtttaatcttgttgatattaggtg

SEQ ID NO: 110531 - DNA, 80 bp, synthetic construct
  source 1..80: mol_type = other DNA
gaattttaagttggcttttaattggctattttgtgggtgtaagctagaatcttcattaacttatagtaatgaaggtaaag

SEQ ID NO: 110532 - DNA, 80 bp, synthetic construct; identical to SEQ ID NO: 21641
  source 1..80: mol_type = other DNA

SEQ ID NO: 110533 - DNA, 80 bp, synthetic construct
  source 1..80: mol_type = other DNA
tacagcactttccttctctttggcagttacatctttgagaggggtgaggaatttgagccggattcctatcaagaaaaaaa

SEQ ID NO: 110534 - DNA, 80 bp, synthetic construct
  source 1..80: mol_type = other DNA
cttcaaaagcagctgacttgatcaccattgaatgcttagtgccatcctttataagctcaaatctgtcatcacctgtgatt

SEQ ID NO: 110535 - DNA, 80 bp, synthetic construct; identical to SEQ ID NO: 21642
  source 1..80: mol_type = other DNA

SEQ ID NO: 110536 - DNA, 80 bp, synthetic construct
  source 1..80: mol_type = other DNA
tgacagttatgaaggatcagaatatgcttctttccatcctcaatgatttcacagtcctgtttggagtgagggttagaagg

SEQ ID NO: 110537 - DNA, 80 bp, synthetic construct
  source 1..80: mol_type = other DNA
gtgaacatcaggttcagaaagttcaatttcaaagtgggctgtttcaccaacaaacacctctactccgtacagaggctttt

SEQ ID NO: 110538 - DNA, 80 bp, synthetic construct
  source 1..80: mol_type = other DNA
tgccttggtcttgtctgtgccacagtcacacacatattcgcctttatctttaaggtccgcctttttgatttttaagatgc

SEQ ID NO: 110539 - DNA, 80 bp, synthetic construct
  source 1..80: mol_type = other DNA
ccactgcagttttgtcatgtaatttcacagtgaagtagggatcggcctctgtaaaagacatttagcataaaattagaaga

SEQ ID NO: 110540 - DNA, 80 bp, synthetic construct; identical to SEQ ID NO: 21643
  source 1..80: mol_type = other DNA

SEQ ID NO: 110541 - DNA, 80 bp, synthetic construct
  source 1..80: mol_type = other DNA
tcaccttcttttactgtttgatcttcaagaggtgacatgaatttcagtcttatacctgaaatgcaagcatagataatgcc

SEQ ID NO: 110542 - DNA, 80 bp, synthetic construct
  source 1..80: mol_type = other DNA
aggggggttgttttggtaacactgtgaaagttaattagtgatgcattatcacagcttttagaacttggcgtcctatcttt

SEQ ID NO: 110543 - DNA, 80 bp, synthetic construct
  source 1..80: mol_type = other DNA
tccatcagcgatgatatcaaatttgtcagatgacttaattatatcaggtcctttggaccatataacatttgcctctcggg

SEQ ID NO: 110544 - DNA, 80 bp, synthetic construct; identical to SEQ ID NO: 21644
  source 1..80: mol_type = other DNA

SEQ ID NO: 110545 - DNA, 80 bp, synthetic construct
  source 1..80: mol_type = other DNA
taataaaagtaagcagagaattccctgtcataacattttacacaaattgttcaagttgtccccaaatgatacgtaaaatt

SEQ ID NO: 110546 - DNA, 80 bp, synthetic construct
  source 1..80: mol_type = other DNA
tttcagtttccattgtccaggaatgtctgcctctgagatttctgcatcaaagcttgcactttctttctcataaatggtaa

SEQ ID NO: 110547 - DNA, 80 bp, synthetic construct; identical to SEQ ID NO: 21645
  source 1..80: mol_type = other DNA

SEQ ID NO: 110548 - DNA, 80 bp, synthetic construct
  source 1..80: mol_type = other DNA
cacatgctggtctcgtataggtttcaccagccaatctctaatgacttctatatgaaaataagatcagaaaaaatgattaa

SEQ ID NO: 110549 - DNA, 80 bp, synthetic construct
  source 1..80: mol_type = other DNA
ccattttcttagtgtaacaataagcagaacgaaatctcccaggaaagtactaacctactacttttacgcaagatgaacac

SEQ ID NO: 110550 - DNA, 80 bp, synthetic construct
  source 1..80: mol_type = other DNA
gctctttgtttaactcgcagctcaagtacaatggctgtcctttgaccactgtgacttcctcttccagtgtttttacaaaa

SEQ ID NO: 110551 - DNA, 80 bp, synthetic construct
  source 1..80: mol_type = other DNA
agaaattaccttctacaacaagtttagccgtggaggtcttttctttgtttcccaaacgtaaaacacaggtgtattcacca

SEQ ID NO: 110552 - DNA, 80 bp, synthetic construct; identical to SEQ ID NO: 21646
  source 1..80: mol_type = other DNA

SEQ ID NO: 110553 - DNA, 80 bp, synthetic construct
  source 1..80: mol_type = other DNA
ctgctggataaaaccagccgtaaagcaattagaagacgagaaaactaaagaccaggcaattgaaaggccaattgagttta

SEQ ID NO: 110554 - DNA, 80 bp, synthetic construct
  source 1..80: mol_type = other DNA
tctgccatgtataaataccatgcatatgaaaaatgaagctaagaacttatgggattcactatgctaaaatatagttggat

SEQ ID NO: 110555 - DNA, 80 bp, synthetic construct
  source 1..80: mol_type = other DNA
tgaactttggaaattcagagtggaaggttacaatgcaagtactagaaaaatgaatttcacctttgataggaccttttggc

SEQ ID NO: 110556 - DNA, 80 bp, synthetic construct; identical to SEQ ID NO: 21647
  source 1..80: mol_type = other DNA

SEQ ID NO: 110557 - DNA, 80 bp, synthetic construct
  source 1..80: mol_type = other DNA
gtaagtcctgattatgtgaaccaaggaaataaggttttgtcaataaatcagtgtagggaaaagggaaatggctgagaggt

SEQ ID NO: 110558 - DNA, 80 bp, synthetic construct
  source 1..80: mol_type = other DNA
ttgattccattattaatacagggacagtataaactgtggaatgagttctctagcttcagcccccaggataactgagaata

SEQ ID NO: 110559 - DNA, 80 bp, synthetic construct
  source 1..80: mol_type = other DNA
caaaagaatatagtgtatttttttatgtcattaaacatggtaatgtccaaatattttgagataattttaaataaaaaaat

SEQ ID NO: 110560 - DNA, 80 bp, synthetic construct; identical to SEQ ID NO: 21648
  source 1..80: mol_type = other DNA

SEQ ID NO: 110561 - DNA, 80 bp, synthetic construct
  source 1..80: mol_type = other DNA
cttcacatcttagaaaattatcaatacatgccttctccccaccccaccaccaccgcccccgctttaaatttactttgttt

SEQ ID NO: 110562 - DNA, 80 bp, synthetic construct
  source 1..80: mol_type = other DNA
agtcaggatgtgtatgtttatcaatgactatcaattacacatcaaatcagttttgatcaattatatctcaaattatcact

SEQ ID NO: 110563 - DNA, 80 bp, synthetic construct
  source 1..80: mol_type = other DNA
atacagattaaaagactgaaatatggagtctcttttttctttttctttcttattgtggtaaaatatacctaacataaaat

SEQ ID NO: 110564 - DNA, 80 bp, synthetic construct; identical to SEQ ID NO: 21649
  source 1..80: mol_type = other DNA

SEQ ID NO: 110565 - DNA, 80 bp, synthetic construct
  source 1..80: mol_type = other DNA
tgaagaaaaggtagaaacttaccataaacctccgaagttgaaatgatacctatgttgcagcataaacagggcttgaattt

SEQ ID NO: 110566 - DNA, 80 bp, synthetic construct
  source 1..80: mol_type = other DNA
ggttcaggttccacaggaggtggtttgattgttttcacttctgtagagagaagtccattgcattagtgtatcaatttgtc

SEQ ID NO: 110567 - DNA, 80 bp, synthetic construct
  source 1..80: mol_type = other DNA
tgttatgtgtgtgaatacagaaagaatatgctgttgacattgaggataagcttgctcacctgcttcgggctttggtttcg

SEQ ID NO: 110568 - DNA, 80 bp, synthetic construct
  source 1..80: mol_type = other DNA
cactgaaataatttagagtagagggcagattattacaggatttttgaagtttttcacaaagtcaaaactaaaattaagcc

SEQ ID NO: 110569 - DNA, 80 bp, synthetic construct; identical to SEQ ID NO: 21650
  source 1..80: mol_type = other DNA

SEQ ID NO: 110570 - DNA, 80 bp, synthetic construct
  source 1..80: mol_type = other DNA
cttcaacctcttcaacaggttttggaggtggtggttctggtactttaagataagattattttttcagtgttaatatttga

SEQ ID NO: 110571 - DNA, 80 bp, synthetic construct
  source 1..80: mol_type = other DNA
actccccttagctctctccttctaaatcacttctataatagttcccaataattttgccctttgagaataggctaatgata

SEQ ID NO: 110572 - DNA, 80 bp, synthetic construct
  source 1..80: mol_type = other DNA
agaatgaagtgcagggaaatacatgaatggatttgggaattactataaaaatatttaaacagaaagcagacaatggaaaa

SEQ ID NO: 110573 - DNA, 80 bp, synthetic construct
  source 1..80: mol_type = other DNA
tttaggttctactttaggttcttcttcttcaggtctttttcttagaactttaaagacaaaaaggtttatatgtaaaccaa

SEQ ID NO: 110574 - DNA, 80 bp, synthetic construct; identical to SEQ ID NO: 21651
  source 1..80: mol_type = other DNA

SEQ ID NO: 110575 - DNA, 80 bp, synthetic construct
  source 1..80: mol_type = other DNA
ttcttcatttgactatcttgtttctcattctttaatattttattagtcagaaagaaatgttcagttttttaaaaatgtta

SEQ ID NO: 110576 - DNA, 80 bp, synthetic construct
  source 1..80: mol_type = other DNA
acttagttatgtctattaacattttaaatttcaaaatactgtgaatgctcacaaaatttctgtcttttttttttaaaaaa

SEQ ID NO: 110577 - DNA, 80 bp, synthetic construct; identical to SEQ ID NO: 21652
  source 1..80: mol_type = other DNA

SEQ ID NO: 110578 - DNA, 80 bp, synthetic construct
  source 1..80: mol_type = other DNA
tacatttcaagttatctcctctgcaaatatctatacagccttgtgatgaaattcaactccattaactgcaggcaaatgta

SEQ ID NO: 110579 - DNA, 80 bp, synthetic construct
  source 1..80: mol_type = other DNA
cgatgttatctacccaaccactaaatgtatgaaaatgatactggcaagtgttagtgccatcattcagtcttctccactga

SEQ ID NO: 110580 - DNA, 80 bp, synthetic construct
  source 1..80: mol_type = other DNA
gctggggaagggccatatctcactttctgaacagaagaagagtagcctttcttaagatttcctttttgaaataatgctgg

SEQ ID NO: 110581 - DNA, 80 bp, synthetic construct; identical to SEQ ID NO: 21653
  source 1..80: mol_type = other DNA

SEQ ID NO: 110582 - DNA, 80 bp, synthetic construct
  source 1..80: mol_type = other DNA
atggttttttatgtgataaagataactgcttaactcttatttcaaaaatttaaacctacaataggcaaatatgtatttcg

SEQ ID NO: 110583 - DNA, 80 bp, synthetic construct
  source 1..80: mol_type = other DNA
cacatgcatctaattaatgtaaagtgaggaggcataatatagattttctttactgatataatgaacatagtgaaaatata

SEQ ID NO: 110584 - DNA, 80 bp, synthetic construct
  source 1..80: mol_type = other DNA
tccccaaaatttcagagtgaccagaaacagtcttaatttctaggtctgaatgtgttgattacttgaacagaacactacta

SEQ ID NO: 110585 - DNA, 80 bp, synthetic construct; identical to SEQ ID NO: 21654
  source 1..80: mol_type = other DNA

SEQ ID NO: 110586 - DNA, 80 bp, synthetic construct
  source 1..80: mol_type = other DNA
gaagacatatgtagatgagacaaagatagaccatgtctatacatgtatgaaatggatgggagacaaaggaagcaacactc

SEQ ID NO: 110587 - DNA, 80 bp, synthetic construct
  source 1..80: mol_type = other DNA
tttcagaggtgtaagctccactttttctggaacctgaggtttttcaggaactttcttctttggaatagctttaaagaata

SEQ ID NO: 110588 - DNA, 80 bp, synthetic construct
  source 1..80: mol_type = other DNA
ctgcagttttactccaaagttcagtagttaattaaagaccagcagaaaaagaagacaatttttgttattggcaggaggaa

SEQ ID NO: 110589 - DNA, 80 bp, synthetic construct; identical to SEQ ID NO: 21655
  source 1..80: mol_type = other DNA

SEQ ID NO: 110590 - DNA, 80 bp, synthetic construct
  source 1..80: mol_type = other DNA
agggaagtttaataataaatgctggataccaaatgtcttcataaccactctttccagctcccctgagaaccacacagaac

SEQ ID NO: 110591 - DNA, 80 bp, synthetic construct
  source 1..80: mol_type = other DNA
ttttggcttttatgtaaatgtgttactgcaatattaaaaatatcttgcaaggatttcttatacattccttaagcataaga

SEQ ID NO: 110592 - DNA, 80 bp, synthetic construct
  source 1..80: mol_type = other DNA
aacccaggaaccatggggcagcagaagagacagctctatgcaatctcacagtacaatcatgtctgaaagtacacacttct

SEQ ID NO: 110593 - DNA, 80 bp, synthetic construct
  source 1..80: mol_type = other DNA
gtttgagttttggcttctcaataaccttttcaggttcaggttcttgaaagagtatttcagaggtgttagtatatgtatat

SEQ ID NO: 110594 - DNA, 80 bp, synthetic construct; identical to SEQ ID NO: 21656
  source 1..80: mol_type = other DNA

SEQ ID NO: 110595 - DNA, 80 bp, synthetic construct
  source 1..80: mol_type = other DNA
ccactggattgaataccttttactggtatttcttcaggctgtggttcaggttcgggctcttcaggtttaatatacttttc

SEQ ID NO: 110596 - DNA, 80 bp, synthetic construct
  source 1..80: mol_type = other DNA
gaaaaagttcttttacttgaactgcctattaattagattattcaatgtatattgatggcaaatgagatgacttttaaaat

SEQ ID NO: 110597 - DNA, 80 bp, synthetic construct
  source 1..80: mol_type = other DNA
tagactgctcttgtatataatttcaagaaggaatattgtcctgtaaatgcttttgtaattctaacaggaatcttcaggag

SEQ ID NO: 110598 - DNA, 80 bp, synthetic construct; identical to SEQ ID NO: 21657
  source 1..80: mol_type = other DNA

SEQ ID NO: 110599 - DNA, 80 bp, synthetic construct
  source 1..80: mol_type = other DNA
attcatctacaatcaaagcaagaggatgaagacaattgtcatctttccaagatttatggagaagccgtgtaccttcagca

SEQ ID NO: 110600 - DNA, 80 bp, synthetic construct
  source 1..80: mol_type = other DNA
agagcttcatcttagatttcatggggaaaatggcttctgagacatggcaccattttggacatcctaattttatatatgaa

SEQ ID NO: 110601 - DNA, 80 bp, synthetic construct
  source 1..80: mol_type = other DNA
taggcctgatctctttcttaagctcctgatacacactcccaacttttatgctttaaaggtgaaaagcacatctaccattt

SEQ ID NO: 110602 - DNA, 80 bp, synthetic construct; identical to SEQ ID NO: 21658
  source 1..80: mol_type = other DNA

SEQ ID NO: 110603 - DNA, 80 bp, synthetic construct
  source 1..80: mol_type = other DNA
gacataagtttacttgacaatccttgaacattctagacccttctatctctgtgcctttcaatatgctcttccctttccat

SEQ ID NO: 110604 - DNA, 80 bp, synthetic construct
  source 1..80: mol_type = other DNA
acaggcacatatcaccacccccagctaatttttgtatttttagtagagacggggtttcaccatgttggccaggctggtct

SEQ ID NO: 110605 - DNA, 80 bp, synthetic construct; identical to SEQ ID NO: 21659
  source 1..80: mol_type = other DNA

SEQ ID NO: 110606 - DNA, 80 bp, synthetic construct
  source 1..80: mol_type = other DNA
tactagttgtagccatgtgatatatcacagcacaactgaatcccactcattttttcactcctgcttgtctgtttcatttt

SEQ ID NO: 110607 - DNA, 80 bp, synthetic construct
  source 1..80: mol_type = other DNA
gttttttggtaacaggcacaggttctttctttactggaacaagtttcttgggcacctcaggcactttgaagatattagtt

SEQ ID NO: 110608 - DNA, 80 bp, synthetic construct
  source 1..80: mol_type = other DNA
atcagaatactttcttttttatgatgccaacgatgaagtgaatacctttagctgctggtgtttctggcttcttaacagtt

SEQ ID NO: 110609 - DNA, 80 bp, synthetic construct
  source 1..80: mol_type = other DNA
acacacaataagaagagtgtaaaattgtagacaccacaaaaatgaagtattcattttaacatgagtacctttaggaggcg

SEQ ID NO: 110610 - DNA, 80 bp, synthetic construct; identical to SEQ ID NO: 21660
  source 1..80: mol_type = other DNA

SEQ ID NO: 110611 - DNA, 80 bp, synthetic construct
  source 1..80: mol_type = other DNA
ctcctcttctgcaacaggaactggcttttcctcttcaggagcaatttcctcttcaggagcaatttcctcaggttcttcat

SEQ ID NO: 110612 - DNA, 80 bp, synthetic construct
  source 1..80: mol_type = other DNA
acttctttgtctattgattcaaatgcttgcaaagcccttttagtgtttaatgtcatttataatcattagttctcctgcct

SEQ ID NO: 110613 - DNA, 80 bp, synthetic construct; identical to SEQ ID NO: 21661
  source 1..80: mol_type = other DNA

SEQ ID NO: 110614 - DNA, 80 bp, synthetic construct
  source 1..80: mol_type = other DNA
ttttgctcaaataacccagggacagatccaagaacaaatttcacaataaggtcagtgatctgtctttggaccctcatata

SEQ ID NO: 110615 - DNA, 80 bp, synthetic construct
  source 1..80: mol_type = other DNA
atttaagaggactcgcaaacaaaaggtttgataataggtgacttattagacaagggtgagtgcttttctgcagaatctca

SEQ ID NO: 110616 - DNA, 80 bp, synthetic construct
  source 1..80: mol_type = other DNA
gaaacaatcaccagtaaacattcatcacatttacacagaacaaaacccttttagaagctgggggctccatccgcccccat

SEQ ID NO: 110617 - DNA, 80 bp, synthetic construct; identical to SEQ ID NO: 21662
  source 1..80: mol_type = other DNA

SEQ ID NO: 110618 - DNA, 80 bp, synthetic construct
  source 1..80: mol_type = other DNA
tgctttcttttctgggacaggtttcttaggtggtacggtcactaaagaattagaaggtatgttttagaaagaacgaagat

SEQ ID NO: 110619 - DNA, 80 bp, synthetic construct
  source 1..80: mol_type = other DNA
tcctcaggctcctcgaacactttaaagacatgagctcattttaatgccagaattgactaaaactgagatagtttgcaaaa

SEQ ID NO: 110620 - DNA, 80 bp, synthetic construct
  source 1..80: mol_type = other DNA
tctgggacagctacctttggcacctctgggactttaaaagatattattattttcattgttagacaaagtaaagacaaaca

SEQ ID NO: 110621 - DNA, 80 bp, synthetic construct
  source 1..80: mol_type = other DNA
accactagaaaaatactttccagagcagaagagtttgatcatctgaagcctaaaatcagtgacaaatacctttaacaggt

SEQ ID NO: 110622 - DNA, 80 bp, synthetic construct; identical to SEQ ID NO: 21663
  source 1..80: mol_type = other DNA

SEQ ID NO: 110623 - DNA, 80 bp, synthetic construct
  source 1..80: mol_type = other DNA
gctttttaggaggagccaagggcattttcttttcaggaacaacctctatgggagcctctggcacttaaaagatattagtg

SEQ ID NO: 110624 - DNA, 80 bp, synthetic construct
  source 1..80: mol_type = other DNA
ttgggagcctctggcacttaaaagatattaggtaaaattacatttaggggttatgaagaccactggaacaaaatgtcttc

SEQ ID NO: 110625 - DNA, 80 bp, synthetic construct; identical to SEQ ID NO: 21664
  source 1..80: mol_type = other DNA

SEQ ID NO: 110626 - DNA, 80 bp, synthetic construct
  source 1..80: mol_type = other DNA
ttctgcagaaaaaggacaggggtaaaaaatacctgtggcaggtggggcttctggttttgtgggaggagccttaggaactt

SEQ ID NO: 110627 - DNA, 80 bp, synthetic construct
  source 1..80: mol_type = other DNA
gagcttctggttttttgggtggagccacgggaatttctttttctgcggcttcttgaggaacttctggcacttgaaagata

SEQ ID NO: 110628 - DNA, 80 bp, synthetic construct
  source 1..80: mol_type = other DNA
ggacaacttcttgagcagcttcaggcacttgaaagatattagtatttttataatttatgaatggcgaaggtatatattac

SEQ ID NO: 110629 - DNA, 80 bp, synthetic construct; identical to SEQ ID NO: 21665
  source 1..80: mol_type = other DNA

SEQ ID NO: 110630 - DNA, 80 bp, synthetic construct
  source 1..80: mol_type = other DNA
gtaatttgtgtttagaaaaggtgaaaatgatggatgccttttgcatataaacacccaccaagatattttggatagtgatt

SEQ ID NO: 110631 - DNA, 80 bp, synthetic construct; identical to SEQ ID NO: 21666
  source 1..80: mol_type = other DNA

SEQ ID NO: 110632 - DNA, 80 bp, synthetic construct
  source 1..80: mol_type = other DNA
ttatgaagaccactagaaaaatattttccagcagcacatcaaaaagcttatccaccatgatcaagtgggcttcatccctg

SEQ ID NO: 110633 - DNA, 80 bp, synthetic construct
  source 1..80: mol_type = other DNA
tgatgggacatatctcaaaataataagagctatttatgacaaacccacagccagtatcatactgaatgggcaaaaactgg

SEQ ID NO: 110634 - DNA, 80 bp, synthetic construct
  source 1..80: mol_type = other DNA
tggcatgattgtatatctagaaaaccccatcgtctcagcccaaaatctccttaagctgataagcaacttcagcaaagtct

SEQ ID NO: 110635 - DNA, 80 bp, synthetic construct
  source 1..80: mol_type = other DNA
ggagaactacaaaccactgctcaacgaaataaaagaggacacaaatggaagaacattccatgctcatggataggaagaac

SEQ ID NO: 110636 - DNA, 80 bp, synthetic construct; identical to SEQ ID NO: 21667
  source 1..80: mol_type = other DNA

SEQ ID NO: 110637 - DNA, 80 bp, synthetic construct
  source 1..80: mol_type = other DNA
aattggatcccttccttacaccttacacaaaaattaattcaagatggagtaaagacttaaatgttagacctaaaaccata

SEQ ID NO: 110638 - DNA, 80 bp, synthetic construct
  source 1..80: mol_type = other DNA
aatgaacaggcaacccacagaatgggagaaaatttttgcaatctactcatctgacgaagggctaatatccagaatctaca

SEQ ID NO: 110639 - DNA, 80 bp, synthetic construct
  source 1..80: mol_type = other DNA
atgagataccatctcacaccagttagaatggtgatcattaaaaagtcaggaaacgacaggcgctggagaggatgtggagc

SEQ ID NO: 110640 - DNA, 80 bp, synthetic construct
  source 1..80: mol_type = other DNA
aaagacacgtgcacacgtatgtttattgcggcactattcatattagcaaagacttggaaccaacccaaatgtccatcaat

SEQ ID NO: 110641 - DNA, 80 bp, synthetic construct; identical to SEQ ID NO: 21668
  source 1..80: mol_type = other DNA

SEQ ID NO: 110642 - DNA, 80 bp, synthetic construct
  source 1..80: mol_type = other DNA
ataaaaagaaaaatattttccagagcacaagagatagatcatctgaagcctaaaatcagtgacaaatacctttaacaggt

SEQ ID NO: 110643 - DNA, 80 bp, synthetic construct
  source 1..80: mol_type = other DNA
aggtcaaatgacaagtacctgtaacaggtggaacttctggctttttaggaagcaccagtgttttcttttctggcacaatt

SEQ ID NO: 110644 - DNA, 80 bp, synthetic construct; identical to SEQ ID NO: 21669
  source 1..80: mol_type = other DNA

SEQ ID NO: 110645 - DNA, 80 bp, synthetic construct
  source 1..80: mol_type = other DNA
cttctggcacttgaaagatattagtagttttatacttaggttaatgaagaggaatggactaaaattgttttcaggaatgg

SEQ ID NO: 110646 - DNA, 80 bp, synthetic construct
  source 1..80: mol_type = other DNA
atggtgaaggtatatattacagtgattgtgaggggtacagacgataagtttttcttagcagaggagagggaataaatacc

SEQ ID NO: 110647 - DNA, 80 bp, synthetic construct; identical to SEQ ID NO: 21670
  source 1..80: mol_type = other DNA

SEQ ID NO: 110648 - DNA, 80 bp, synthetic construct
  source 1..80: mol_type = other DNA
agatattttggatagtgattgacatttgttttctttagaattatatcatctttatgtagtaggatttttaacatgtaatt

SEQ ID NO: 110649 - DNA, 80 bp, synthetic construct
  source 1..80: mol_type = other DNA
tcattattagacaaagtaaagacaaacaaacaatatcaaacacagcaacaagagggtgtctaccttttgtgggtggcact

SEQ ID NO: 110650 - DNA, 80 bp, synthetic construct; identical to SEQ ID NO: 21671
  source 1..80: mol_type = other DNA

SEQ ID NO: 110651 - DNA, 80 bp, synthetic construct
  source 1..80: mol_type = other DNA
caaatggagtaaaatatttctaagatcagaagagatatttcttctgcagaaaaaggacaggggtaaaaaatacctgtggc

SEQ ID NO: 110652 - DNA, 80 bp, synthetic construct
  source 1..80: mol_type = other DNA
tgcagaatgaagtcagggctaaagtgtacctgggacaattggagcttctggttttttgggtggagccacgggaatttctt

SEQ ID NO: 110653 - DNA, 80 bp, synthetic construct; identical to SEQ ID NO: 21672
  source 1..80: mol_type = other DNA

SEQ ID NO: 110654 - DNA, 80 bp, synthetic construct
  source 1..80: mol_type = other DNA
caacttctttaggagcttcaggaactttgaagatattagtatcttttagttagaagctataaagggggaatatcgactcc

SEQ ID NO: 110655 - DNA, 80 bp, synthetic construct
  source 1..80: mol_type = other DNA
cttccttcggtggcagcacttcaggcacttcaaagatatttgtaatttgtgtttagaaaaggtgaaaatgatggatgcct

SEQ ID NO: 110656 - DNA, 80 bp, synthetic construct
  source 1..80: mol_type = other DNA
caacttcttttctgggacagctgcctttggcacctctgggactttaaagatattagtattttcattattagacaaagtaa

SEQ ID NO: 110657 - DNA, 80 bp, synthetic construct; identical to SEQ ID NO: 21673
  source 1..80: mol_type = other DNA

SEQ ID NO: 110658 - DNA, 80 bp, synthetic construct; identical to SEQ ID NO: 21674
  source 1..80: mol_type = other DNA

SEQ ID NO: 110659 - DNA, 80 bp, synthetic construct
  source 1..80: mol_type = other DNA
tagaaaaaaatattgtcaagagcagaagaattaggtcttctgaagcctaaagtcagtgacaaatacctttaacaggtggg

SEQ ID NO: 110660 - DNA, 80 bp, synthetic construct
  source 1..80: mol_type = other DNA
ttctcctgagctgagatcagtggtaacaagttcccataataggtggtgtttcaggttttagaggaggaacttccggtatt

SEQ ID NO: 110661 - DNA, 80 bp, synthetic construct
  source 1..80: mol_type = other DNA
tcccaccataaaaagacagttaagaatgtacctttgacaggtacaacttcagccctttggggaggatgcactttcttttc

SEQ ID NO: 110662 - DNA, 80 bp, synthetic construct; identical to SEQ ID NO: 21675
  source 1..80: mol_type = other DNA

SEQ ID NO: 110663 - DNA, 80 bp, synthetic construct
  source 1..80: mol_type = other DNA
tctctttttttggaaggaactgtcttggcaggaataatttcttgaggagcttcgggcgcttgaaagatattagcaattca

SEQ ID NO: 110664 - DNA, 80 bp, synthetic construct
  source 1..80: mol_type = other DNA
cagaacctcacagagctctcgcgacactctacactctcattataaaggatttgttgaatgaatacttccagcaggagtgt

SEQ ID NO: 110665 - DNA, 80 bp, synthetic construct
  source 1..80: mol_type = other DNA
cttccacatttgttcagaggtaacgtacttttcatacgtggagtttctggctcttcaggtacatcctcaaatattttcat

SEQ ID NO: 110666 - DNA, 80 bp, synthetic construct
  source 1..80: mol_type = other DNA
atcttgaggagaggaaccacatattaattgtctttgtttattattctccagttccctagcaccctgtacatgctaagcac

SEQ ID NO: 110667 - DNA, 80 bp, synthetic construct; identical to SEQ ID NO: 21676
  source 1..80: mol_type = other DNA

SEQ ID NO: 110668 - DNA, 80 bp, synthetic construct
  source 1..80: mol_type = other DNA
aatcggatcttttgtagcagtgtgagtatttggttataagcggctgttttcttggtcacctcaggcactatcagtattag

SEQ ID NO: 110669 - DNA, 80 bp, synthetic construct
  source 1..80: mol_type = other DNA
tcgaaaaatctaggtcggcatttttttgtattcacacctcaggcaccttaaaaaggtgagtgtttttcaagtttaggaga

SEQ ID NO: 110670 - DNA, 80 bp, synthetic construct
  source 1..80: mol_type = other DNA
aaaatgatgcttgaaaaataaaagataggctatgagaggagcaaatgaacatggaggggagatttccagctttaactgga

SEQ ID NO: 110671 - DNA, 80 bp, synthetic construct; identical to SEQ ID NO: 21677
  source 1..80: mol_type = other DNA

SEQ ID NO: 110672 - DNA, 80 bp, synthetic construct
  source 1..80: mol_type = other DNA
ggtgatggtgtttttcttcttttaacaataggagtttctccctctggaatgacttccttgaagacttcaaactctttaaa

SEQ ID NO: 110673 - DNA, 80 bp, synthetic construct
  source 1..80: mol_type = other DNA
ttcttgggggcaagtcataggtcattctttgttgtgggtatatcagatcctttaaacacagtattttaacattagaggtt

SEQ ID NO: 110674 - DNA, 80 bp, synthetic construct
  source 1..80: mol_type = other DNA
tagcctcaggtggctccacctctggaaaaatgcctctggttgtatcaggttctttaaagatattagtaggtttacattta

SEQ ID NO: 110675 - DNA, 80 bp, synthetic construct
  source 1..80: mol_type = other DNA
taggaatagtcacatatattttgtcttctggaacaactttcttgggtggctcaggcacttaaaagatatgagtatagtta

SEQ ID NO: 110676 - DNA, 80 bp, synthetic construct; identical to SEQ ID NO: 21678
  source 1..80: mol_type = other DNA

SEQ ID NO: 110677 - DNA, 80 bp, synthetic construct
  source 1..80: mol_type = other DNA
ggggatagcctcactcccagtttcatgatgtaagactctaagcatttctctatgatgatgataataaaatggaggaattg

SEQ ID NO: 110678 - DNA, 80 bp, synthetic construct
  source 1..80: mol_type = other DNA
tcaaatcacatctaatatatggtttcacagtttaatatgaatgtaaaagccatttagggtttggaggcagaaaattaaaa

SEQ ID NO: 110679 - DNA, 80 bp, synthetic construct; identical to SEQ ID NO: 21679
  source 1..80: mol_type = other DNA

SEQ ID NO: 110680 - DNA, 80 bp, synthetic construct
  source 1..80: mol_type = other DNA
ggctggggcaggagaatagcttgaacccaggagacggaggttgcagtgagccaagatcgtgccactgcactgcagcctgg

SEQ ID NO: 110681 - DNA, 80 bp, synthetic construct
  source 1..80: mol_type = other DNA
gaaacccccccccaaaaaaaaaggtcgtgagaattcttttgaggtttgagtggccttgtaaacctagggtcctttgagca

SEQ ID NO: 110682 - DNA, 80 bp, synthetic construct
  source 1..80: mol_type = other DNA
gaaaataaattgcttcaaagcaaaagacacttgtatacagaataggttaggaaaatttaacaagacaactgacttttctg

SEQ ID NO: 110683 - DNA, 80 bp, synthetic construct
  source 1..80: mol_type = other DNA
caaacatagtgaatttaaggacataaatgaaacgaaaaagaaccactaatttttctacactcactgtacatctctgtgtc

SEQ ID NO: 110684 - DNA, 80 bp, synthetic construct; identical to SEQ ID NO: 21680
  source 1..80: mol_type = other DNA

SEQ ID NO: 110685 - DNA, 80 bp, synthetic construct
  source 1..80: mol_type = other DNA
gtcaactataagtcaaatgtagtcattgcatttctctgaattgctttgtcgatgagttcttgattcattatatcagaaac

SEQ ID NO: 110686 - DNA, 80 bp, synthetic construct
  source 1..80: mol_type = other DNA
gataactttgggcttatgtctttacgcctaaaacattgcctcaaaaggcaggattatgttatagaacataaattgaagtt

SEQ ID NO: 110687 - DNA, 80 bp, synthetic construct; identical to SEQ ID NO: 21681
  source 1..80: mol_type = other DNA

SEQ ID NO: 110688 - DNA, 80 bp, synthetic construct
  source 1..80: mol_type = other DNA
aacaaaaatccagggaaatttcccatgttagaatggtaagaacttgagaagaaaaattaacagtacaccttcagctggtg

SEQ ID NO: 110689 - DNA, 80 bp, synthetic construct
  source 1..80: mol_type = other DNA
ctattactgtttgtttttgtggaagagttgctaccttctcttcagtgataacttacgcacatgcttcagagactttaaag

SEQ ID NO: 110690 - DNA, 80 bp, synthetic construct
  source 1..80: mol_type = other DNA
atcagtaagcatgttagtgaatatataaccaaatagcaccaaaggaggaaatttgggctcactatttggttactagagat

SEQ ID NO: 110691 - DNA, 80 bp, synthetic construct
  source 1..80: mol_type = other DNA
acagaagaaagacatcaagtggaatgcaaacttgtgcttataaagcaaccaaggtgctattgtatgtaaagttaagtagt

SEQ ID NO: 110692 - DNA, 80 bp, synthetic construct
  source 1..80: mol_type = other DNA
tttggtttagaatgaactcttgaagtattttggagcactactactaacgttagtacaatgaggggtcacaaaattcttta

SEQ ID NO: 110693 - DNA, 80 bp, synthetic construct; identical to SEQ ID NO: 21682
  source 1..80: mol_type = other DNA

SEQ ID NO: 110694 - DNA, 80 bp, synthetic construct
  source 1..80: mol_type = other DNA
tcctcagtgaactgaggagtttctttttcacttaaccaatgacactggtcagttattttggtacctgtaacaattgtgta

SEQ ID NO: 110695 - DNA, 80 bp, synthetic construct
  source 1..80: mol_type = other DNA
ttcatggggtttctaatcttccaaactgaacacaaaatttactttcaaaggaaagttagagcaagatataagaatttgta

SEQ ID NO: 110696 - DNA, 80 bp, synthetic construct
  source 1..80: mol_type = other DNA
gaaactcgccttcttcaaaatattcttcaacttcatggaactcttcttcttccggaatttcttccacttctgcttctact

SEQ ID NO: 110697 - DNA, 80 bp, synthetic construct; identical to SEQ ID NO: 21683
  source 1..80: mol_type = other DNA

SEQ ID NO: 110698 - DNA, 80 bp, synthetic construct
  source 1..80: mol_type = other DNA
cgaaaaaagacagaagaggaagtcaggtttaaaagagaagatgtacctttggctgggggtgcctcttttttctgaacagg

SEQ ID NO: 110699 - DNA, 80 bp, synthetic construct
  source 1..80: mol_type = other DNA
acatccattttagaggcaataaagatactttctcaaatcactcatttgttctaacattcctatagaagaagaaatgtcca

SEQ ID NO: 110700 - DNA, 80 bp, synthetic construct; identical to SEQ ID NO: 21684
  source 1..80: mol_type = other DNA

SEQ ID NO: 110701 - DNA, 80 bp, synthetic construct
  source 1..80: mol_type = other DNA
aactccgttccacttatggaataaaatctaaaatgtggggaagagggatccattgctatgtgtataagtatatagagaca

SEQ ID NO: 110702 - DNA, 80 bp, synthetic construct
  source 1..80: mol_type = other DNA
aaggcagtcaaaaaagaaaatgttgcttttaagaaagaaaattaatgggaagttaaagatattaataatgaggatttgat

SEQ ID NO: 110703 - DNA, 80 bp, synthetic construct
  source 1..80: mol_type = other DNA
tcacaaaacattgacttatttttaaaagatattagcaacctaaatggtaataataaatgtggagtaggaaccctagaggt

SEQ ID NO: 110704 - DNA, 80 bp, synthetic construct
  source 1..80: mol_type = other DNA
aaggattgaaatctaggagaaactattatagtagggcctggtcagaaaaaaattcaatcgccaataacaaaatagtaatc

SEQ ID NO: 110705 - DNA, 80 bp, synthetic construct; identical to SEQ ID NO: 21685
  source 1..80: mol_type = other DNA

SEQ ID NO: 110706 - DNA, 80 bp, synthetic construct
  source 1..80: mol_type = other DNA
agtgataatatctgaaaactgctcagccttcgaaacgcttgtgtaaactcactagtccttaaaaaatctctactgggtct

SEQ ID NO: 110707 - DNA, 80 bp, synthetic construct
  source 1..80: mol_type = other DNA
ccacttggggtagaaatcagattttctgcaccagttactcaggcttaactggaatttctcttggataagcttattttaca

SEQ ID NO: 110708 - DNA, 80 bp, synthetic construct
  source 1..80: mol_type = other DNA
aatagcaaacagacaaacaggctgaacatgcaaagagattcaaataatattaatttgcctgcccaatttctattaggtta

SEQ ID NO: 110709 - DNA, 80 bp, synthetic construct; identical to SEQ ID NO: 21686
  source 1..80: mol_type = other DNA

SEQ ID NO: 110710 - DNA, 80 bp, synthetic construct
  source 1..80: mol_type = other DNA
aataaaaaggtttgtggtttaagatttagggtttattaaagagaaattctactttttactgctggagcctctatttcttt

SEQ ID NO: 110711 - DNA, 80 bp, synthetic construct
  source 1..80: mol_type = other DNA
catacatagagaaacgatgtaaagcacaccaacaccaagtgaaaaaatggacacaacacaaacttgggtgcaaaagagtc

SEQ ID NO: 110712 - DNA, 80 bp, synthetic construct
  source 1..80: mol_type = other DNA
ggagggaccttcttttctggctcaggtttcttaggtaccacagacactttaaaaatattattttattttataagttcagt

SEQ ID NO: 110713 - DNA, 80 bp, synthetic construct; identical to SEQ ID NO: 21687
  source 1..80: mol_type = other DNA

SEQ ID NO: 110714 - DNA, 80 bp, synthetic construct
  source 1..80: mol_type = other DNA
tgtcatgttagttgggagcccagatattataatgtaattgggatttgtaaagcaagggaccagcagcatatgtcattatc

SEQ ID NO: 110715 - DNA, 80 bp, synthetic construct
  source 1..80: mol_type = other DNA
atccaataaaagatcagctttactatttcatttgattatataactatatggcctgatgcgagggttatgctgattttaag

SEQ ID NO: 110716 - DNA, 80 bp, synthetic construct; identical to SEQ ID NO: 21688
  source 1..80: mol_type = other DNA

SEQ ID NO: 110717 - DNA, 80 bp, synthetic construct
  source 1..80: mol_type = other DNA
atctttttttctttttagcctggtgttaaaaaggcatttaatataaatggttgaaggaagaaatttaagaatatttattc

SEQ ID NO: 110718 - DNA, 80 bp, synthetic construct
  source 1..80: mol_type = other DNA
tgggacaatgcttcctttcatctttgttcttgaatactgctttgtatcagtgaaaaaagtagatatcagtgttcctgaac

SEQ ID NO: 110719 - DNA, 80 bp, synthetic construct
  source 1..80: mol_type = other DNA
tttaggggcgggaacagggactttcttctctggtacaggtttctttggcacttcaggcacttaaaaacatttcatttgaa

SEQ ID NO: 110720 - DNA, 80 bp, synthetic construct
  source 1..80: mol_type = other DNA
aagaacacacatgtctggaatgttttctaagatttaggtggtcaatcacagagggtaaaggattatagataaaactggag

SEQ ID NO: 110721 - DNA, 80 bp, synthetic construct; identical to SEQ ID NO: 21689
  source 1..80: mol_type = other DNA

SEQ ID NO: 110722 - DNA, 80 bp, synthetic construct
  source 1..80: mol_type = other DNA
tcctgaggtagagctacaggaactggaactggttcacgtttctttggcactttaaagatatttattcaagggtacaaaca

SEQ ID NO: 110723 - DNA, 80 bp, synthetic construct
  source 1..80: mol_type = other DNA
ttacagattaatgtacctttgggtggtggtgcttccacttttttcggaacaggtgttggtttcttttcttctgggatgag

SEQ ID NO: 110724 - DNA, 80 bp, synthetic construct; identical to SEQ ID NO: 21690
  source 1..80: mol_type = other DNA

SEQ ID NO: 110725 - DNA, 80 bp, synthetic construct
  source 1..80: mol_type = other DNA
tccaagcatagtttcaaaagattaagataaggtaataaaagtatgacaaaggtattccaagaagcattttatttttaaaa

SEQ ID NO: 110726 - DNA, 80 bp, synthetic construct
  source 1..80: mol_type = other DNA
gtactttctcctctggcacaggtttcttgggcacttcaggaacttcaaagatatcaaatagagttagtgtcacatttttt

SEQ ID NO: 110727 - DNA, 80 bp, synthetic construct
  source 1..80: mol_type = other DNA
ctggtgataaagacaagacacaatgcctggtaaatgatggttttgtccattttgatatgcaaaaggaatgtattttactt

SEQ ID NO: 110728 - DNA, 80 bp, synthetic construct; identical to SEQ ID NO: 21691
  source 1..80: mol_type = other DNA

SEQ ID NO: 110729 - DNA, 80 bp, synthetic construct
  source 1..80: mol_type = other DNA
cacacacacaaggttttgaactcagaagaaagttaactatttctaggcagatgaagtctcttagatacccgtcaatgaat

SEQ ID NO: 110730 - DNA, 80 bp, synthetic construct
  source 1..80: mol_type = other DNA
tagaaatcatatttcagcatctaaaaatatctgctttaaagtaagcaatcattggtgctgccaataacccccagaatctg

SEQ ID NO: 110731 - DNA, 80 bp, synthetic construct
  source 1..80: mol_type = other DNA
acatgggttacaacttcctcttcaaaggcaacctcttctggttcaagttctttaggcacttctggcactttaaagatatt

SEQ ID NO: 110732 - DNA, 80 bp, synthetic construct
  source 1..80: mol_type = other DNA
cagaactgaagaggaattcaacagcaaaagacgaacaaaacattaaaatgagtgccattaggtacctctaacaggtggtg

SEQ ID NO: 110733 - DNA, 80 bp, synthetic construct; identical to SEQ ID NO: 21692
  source 1..80: mol_type = other DNA

SEQ ID NO: 110734 - DNA, 80 bp, synthetic construct
  source 1..80: mol_type = other DNA
gcagagcccaaatgtgaaatgaggtttagtgttcaaatatctctgcttgaaagaaatatccttcctgaaaagtgaaattt

SEQ ID NO: 110735 - DNA, 80 bp, synthetic construct
  source 1..80: mol_type = other DNA
ggaatatgccaaacggtcactgattttaaacccaaacattctattttatatgtattgtagccatgtggcaggacacagcc

SEQ ID NO: 110736 - DNA, 80 bp, synthetic construct; identical to SEQ ID NO: 21693
  source 1..80: mol_type = other DNA

SEQ ID NO: 110737 - DNA, 80 bp, synthetic construct
  source 1..80: mol_type = other DNA
gaacatcctactcagcaaaaacacagaccatcagacgggctaggaagacatgattttagaacatacataacaaagttgtt

SEQ ID NO: 110738 - DNA, 80 bp, synthetic construct
  source 1..80: mol_type = other DNA
aggtttgagtttcttaggaatgggcactggtactttttcttcagggacagctttcttcagcacttcaaaatatcaatatt

SEQ ID NO: 110739 - DNA, 80 bp, synthetic construct
  source 1..80: mol_type = other DNA
tcttacaggtaataatgtttttttcactctacctttagccggtggggcctttggttttgtgggaactggttcttctggga

SEQ ID NO: 110740 - DNA, 80 bp, synthetic construct; identical to SEQ ID NO: 21694
  source 1..80: mol_type = other DNA

SEQ ID NO: 110741 - DNA, 80 bp, synthetic construct
  source 1..80: mol_type = other DNA
agactatgtagaatgttctcaaagttgggctatgaaacatcagagactgaataagtgaaataagattgattcatttcaaa

SEQ ID NO: 110742 - DNA, 80 bp, synthetic construct
  source 1..80: mol_type = other DNA
taacttttgaagcagtcattgtcaagttttgataatgggaaccctgtgggtaaatacattttctcaatagcctatcatac

SEQ ID NO: 110743 - DNA, 80 bp, synthetic construct
  source 1..80: mol_type = other DNA
gctattttgcatacgagcaaaaatgaggggggtattagattattcccggaacaaaagtctaacaataaccttaagattta

SEQ ID NO: 110744 - DNA, 80 bp, synthetic construct; identical to SEQ ID NO: 21695
  source 1..80: mol_type = other DNA

SEQ ID NO: 110745 - DNA, 80 bp, synthetic construct
  source 1..80: mol_type = other DNA
ataagccctttctttctcttccattatagttacttctgaaacaatattaacaacaggcagcactttactttaaagcactt

SEQ ID NO: 110746 - DNA, 80 bp, synthetic construct
  source 1..80: mol_type = other DNA
atcaacaataagctaataaagtataggagtcagattgggaactagaaggcaaagagccagatagtttcatgcctcacatt

SEQ ID NO: 110747 - DNA, 80 bp, synthetic construct
  source 1..80: mol_type = other DNA
gagaaattttgttcaaacaattcaaggacaaagacaaccataacagtgcctgattaaactttcatttaaaaagcaagaaa

SEQ ID NO: 110748 - DNA, 80 bp, synthetic construct; identical to SEQ ID NO: 21696
  source 1..80: mol_type = other DNA

SEQ ID NO: 110749 - DNA, 80 bp, synthetic construct
  source 1..80: mol_type = other DNA
tactttctgttatcaaaaatgtttagttttgaagtgatatgcattaacaaacttatattgcttactttatactatgtctt

SEQ ID NO: 110750 - DNA, 80 bp, synthetic construct
  source 1..80: mol_type = other DNA
cggttcctctggcactttaaagagagatttcactttaaagtattgtttccctctttcaaaccacaaaaaggcagccataa

SEQ ID NO: 110751 - DNA, 80 bp, synthetic construct
  source 1..80: mol_type = other DNA
ataatggaagggcggatgtacctcttgcttttggaggcgcctcttttttagttacagcaacaagaactttttcttcctgg

SEQ ID NO: 110752 - DNA, 80 bp, synthetic construct; identical to SEQ ID NO: 21697
  source 1..80: mol_type = other DNA

SEQ ID NO: 110753 - DNA, 80 bp, synthetic construct
  source 1..80: mol_type = other DNA
acttaaaagataccaggcaataccatcaaacatacgatatggaaaacactaaacacaggcacacttattttctggttaat

SEQ ID NO: 110754 - DNA, 80 bp, synthetic construct
  source 1..80: mol_type = other DNA
actttagaaagattaggtttaagaatatgagtttgccttacatatgaagtgacacagttgtggggcttagcattcacttt

SEQ ID NO: 110755 - DNA, 80 bp, synthetic construct
  source 1..80: mol_type = other DNA
gcatttctttgaaagaaatcatacctttagccggtggaggctcctctattttagcaggaatttttggtttcagtacaatt

SEQ ID NO: 110756 - DNA, 80 bp, synthetic construct; identical to SEQ ID NO: 21698
  source 1..80: mol_type = other DNA

SEQ ID NO: 110757 - DNA, 80 bp, synthetic construct
  source 1..80: mol_type = other DNA
gccaaacccctgcttgttcctatttaaaatactcaaagagcattttaatcaaagcacatgcgttaatgaagagtatggga

SEQ ID NO: 110758 - DNA, 80 bp, synthetic construct
  source 1..80: mol_type = other DNA
gaggatttaagtgaattgtaagataatattccatattgttttccccgccagttttgtggggcaggtatggtagaagaggc

SEQ ID NO: 110759 - DNA, 80 bp, synthetic construct
  source 1..80: mol_type = other DNA
tcctgcctcagcctcccaagtagctgggactacaggcgcccgccactacgcccggctaattttttgtatttttagtagag

SEQ ID NO: 110760 - DNA, 80 bp, synthetic construct; identical to SEQ ID NO: 21699
  source 1..80: mol_type = other DNA

SEQ ID NO: 110761 - DNA, 80 bp, synthetic construct
  source 1..80: mol_type = other DNA
ctggtcaaagttaaataaggaatagaagtgtctggttaaaaacatatctgctccttacgctgaaagtaaacctaacaagc

SEQ ID NO: 110762 - DNA, 80 bp, synthetic construct
  source 1..80: mol_type = other DNA
ttttacaaacacttttagaaaagatggagtcgtcttcaaatctaccagcttcctgacttatgtccaccatcatggcctct

SEQ ID NO: 110763 - DNA, 80 bp, synthetic construct
  source 1..80: mol_type = other DNA
gactatggcaccttggatttttacatgggcttttgttccaagtgaaaaaaggggcatggtgtgccatcttttattagaca

SEQ ID NO: 110764 - DNA, 80 bp, synthetic construct
  source 1..80: mol_type = other DNA
gaatgctggattttagttggaaacctggtgctgccttaattcattgaaaaaatatcccaatggaatagtttgttggttct

SEQ ID NO: 110765 - DNA, 80 bp, synthetic construct; identical to SEQ ID NO: 21700
  source 1..80: mol_type = other DNA

SEQ ID NO: 110766 - DNA, 80 bp, synthetic construct
  source 1..80: mol_type = other DNA
cattaggctactaaggtaaagcttatgccagcccaccatgctgaagccaagtcctgtttaatgaaaggatatatgtatat

SEQ ID NO: 110767 - DNA, 80 bp, synthetic construct
  source 1..80: mol_type = other DNA
gtagatgttcactgaatttgtgtcacttttttctgtctcttttcattggtctgtagacaatttgtgaaagaaaacacctc

SEQ ID NO: 110768 - DNA, 80 bp, synthetic construct
  source 1..80: mol_type = other DNA
cctcttctgagtaactccattcctcctctgcagatactttaaaagataaggtttcatttaaattcagcctgctgagatac

SEQ ID NO: 110769 - DNA, 80 bp, synthetic construct; identical to SEQ ID NO: 21701
  source 1..80: mol_type = other DNA

SEQ ID NO: 110770 - DNA, 80 bp, synthetic construct
  source 1..80: mol_type = other DNA
ttatataccttcgtgccgcgtgacttccactctttgaggaactgcgaaggatagtttttcttcagcaacaaatctctttt

SEQ ID NO: 110771 - DNA, 80 bp, synthetic construct
  source 1..80: mol_type = other DNA
aggacataaacacaaaagtttcactgcaagtgagacaatggatcagtataagcacagaccagatggaaaaagcaagaatt

SEQ ID NO: 110772 - DNA, 80 bp, synthetic construct; identical to SEQ ID NO: 21702
  source 1..80: mol_type = other DNA

SEQ ID NO: 110773 - DNA, 80 bp, synthetic construct
  source 1..80: mol_type = other DNA
ttcttcctccttccgaggaacaggtttcctttcttcaggaactttcttctttggtatttctggcacttaaaggatagtat

SEQ ID NO: 110774 - DNA, 80 bp, synthetic construct
  source 1..80: mol_type = other DNA
aagtacctgctggtggtggagattcctctctttgagttacaatggttattttttcttctgtcacaactcccttctgtact

SEQ ID NO: 110775 - DNA, 80 bp, synthetic construct
  source 1..80: mol_type = other DNA
attaaacacaacatattttgtatcaaagataaaagatagggctttacgtcgaaagccactgtacctttagctgggggagc

SEQ ID NO: 110776 - DNA, 80 bp, synthetic construct; identical to SEQ ID NO: 21703
  source 1..80: mol_type = other DNA

SEQ ID NO: 110777 - DNA, 80 bp, synthetic construct
  source 1..80: mol_type = other DNA
acacaaacaatcaagaatgtggatatggtatatagaaaacttctttacgctttgtattgagaaatggagtacttaataac

SEQ ID NO: 110778 - DNA, 80 bp, synthetic construct
  source 1..80: mol_type = other DNA
gtagtgaattcaaaactcaggaaacactctagagtaggtctctcaatctgatacccatgtgttaatgactttacagagct

SEQ ID NO: 110779 - DNA, 80 bp, synthetic construct
  source 1..80: mol_type = other DNA
taacagcatgcattattggcaataattgttctcattttaaatacaatattggcagcttttgtgaatccctgcacctctgc

SEQ ID NO: 110780 - DNA, 80 bp, synthetic construct
  source 1..80: mol_type = other DNA
gaagacatatatgactttgctgaaaacgaattagtgattacacaaacagtcaagaatgttcagatagtatatagaaaagg

SEQ ID NO: 110781 - DNA, 80 bp, synthetic construct; identical to SEQ ID NO: 21704
  source 1..80: mol_type = other DNA

SEQ ID NO: 110782 - DNA, 80 bp, synthetic construct
  source 1..80: mol_type = other DNA
agggatttgtgatataccacagcagcacattttcattcaaacatacctctgtgaaaggtactttgactagctaattagat

SEQ ID NO: 110783 - DNA, 80 bp, synthetic construct
  source 1..80: mol_type = other DNA
agttctgccagacactctccagttgtcattgcctgtctccacctcttcataatgcatgaaactgcttttattaagaaaaa

SEQ ID NO: 110784 - DNA, 80 bp, synthetic construct
  source 1..80: mol_type = other DNA
ttaggaatattcagtataataaataaagtatgtcaagagcatggcacggaagctgacaaacagtaaaaacacaagaagaa

SEQ ID NO: 110785 - DNA, 80 bp, synthetic construct; identical to SEQ ID NO: 21705
  source 1..80: mol_type = other DNA

SEQ ID NO: 110786 - DNA, 80 bp, synthetic construct
  source 1..80: mol_type = other DNA
cattacatacattacacaagcagacaaagacccagttagcgtgatctggagtttagaaatgttaccaatacttgtataac

SEQ ID NO: 110787 - DNA, 80 bp, synthetic construct
  source 1..80: mol_type = other DNA
attatttttttcacaaatattattctaccttttggtgctgggggctccacttttttagggataggaacaggggccacttc

SEQ ID NO: 110788 - DNA, 80 bp, synthetic construct
  source 1..80: mol_type = other DNA
tgagagtaaatgaagatggctgaatggctaattagaaaatgtgactgctgtcacctttaactgcagaagcctctactttg

SEQ ID NO: 110789 - DNA, 80 bp, synthetic construct; identical to SEQ ID NO: 21706
  source 1..80: mol_type = other DNA

SEQ ID NO: 110790 - DNA, 80 bp, synthetic construct
  source 1..80: mol_type = other DNA
acattatatggcatttccaccacacagacacaaagatggaaacaatctcagaaacacagataagaacaaaatgcagtaaa

SEQ ID NO: 110791 - DNA, 80 bp, synthetic construct
  source 1..80: mol_type = other DNA
gacactgtatttccaagtaacaggttacgagattgcaaactctctgaagcagggaatggagcctcccataattttcactt

SEQ ID NO: 110792 - DNA, 80 bp, synthetic construct
  source 1..80: mol_type = other DNA
ttagaatgaattactaatacctttaggtggtggttcaacccttttggaaatggcaacgtgaattttctcttcagtaacaa

SEQ ID NO: 110793 - DNA, 80 bp, synthetic construct; identical to SEQ ID NO: 21707
  source 1..80: mol_type = other DNA

SEQ ID NO: 110794 - DNA, 80 bp, synthetic construct
  source 1..80: mol_type = other DNA
cacatggattttatactcaagtatttagacacagaatgagtgggttaatatggtagcttgagaacaaattcagtattgac

SEQ ID NO: 110795 - DNA, 80 bp, synthetic construct
  source 1..80: mol_type = other DNA
atctgttagggtctatttctataaataagaggacagggaatattatatgcaatggaatgcattgcatagtgaagttagca

SEQ ID NO: 110796 - DNA, 80 bp, synthetic construct; identical to SEQ ID NO: 21708
  source 1..80: mol_type = other DNA

SEQ ID NO: 110797 - DNA, 80 bp, synthetic construct
  source 1..80: mol_type = other DNA
ctttggtgacttgaactttttcttcctccattcttcgagaagtcttttcaattttttcaattactggcttctttataact

SEQ ID NO: 110798 - DNA, 80 bp, synthetic construct
  source 1..80: mol_type = other DNA
ttctttgacctttacgcacaactttgaactctgggtacaagtttctgtacttaacatattttggttatatttaagtttac

SEQ ID NO: 110799 - DNA, 80 bp, synthetic construct
  source 1..80: mol_type = other DNA
ttgatgctctagtctatttaaatatttctaattacttacctttaggaggtggtggtgctttcttttcaggtactttggct

SEQ ID NO: 110800 - DNA, 80 bp, synthetic construct; identical to SEQ ID NO: 21709
  source 1..80: mol_type = other DNA

SEQ ID NO: 110801 - DNA, 80 bp, synthetic construct
  source 1..80: mol_type = other DNA
ttcatagcattgaaaatttaatgaactgagcaaaaatgaagaaaagagggaaacaagtcattcagtttatacataccttc

SEQ ID NO: 110802 - DNA, 80 bp, synthetic construct
  source 1..80: mol_type = other DNA
atctcttcatagtcttcatctggttcttcataataaggttgttcaaatggctctgtgtatggttctacctccagttcgtc

SEQ ID NO: 110803 - DNA, 80 bp, synthetic construct
  source 1..80: mol_type = other DNA
gctaaaatagataaagatactattagcatattaattctatccatccaactgcttcactaaacaaaaatctacctagttaa

SEQ ID NO: 110804 - DNA, 80 bp, synthetic construct; identical to SEQ ID NO: 21710
  source 1..80: mol_type = other DNA

SEQ ID NO: 110805 - DNA, 80 bp, synthetic construct
  source 1..80: mol_type = other DNA
tatgatcccttagtcagtttcataaaaacaacatttaaaattatgtaaccaagttaattaggtacttttagataacagat

SEQ ID NO: 110806 - DNA, 80 bp, synthetic construct
  source 1..80: mol_type = other DNA
ttgcacagaggcagcataaacatctgcctgggtttgttttcctgggaaaggggcaatatgaaatagccatcatttctaat

SEQ ID NO: 110807 - DNA, 80 bp, synthetic construct
  source 1..80: mol_type = other DNA
atctttatttaccttttgctggaattaaggtagtaggaggtggaggcttcttgacaatctctgggagtttaaaaacataa

SEQ ID NO: 110808 - DNA, 80 bp, synthetic construct
  source 1..80: mol_type = other DNA
ctatgcaaggccatattaacaaaaatcaaacatgcaaaaggccaaagtttgattctagtttagattgatttaagatcatt

SEQ ID NO: 110809 - DNA, 80 bp, synthetic construct; identical to SEQ ID NO: 21711
  source 1..80: mol_type = other DNA

SEQ ID NO: 110810 - DNA, 80 bp, synthetic construct
  source 1..80: mol_type = other DNA
atcacctaaatcaggaaagatactgaggtgggttgcagcaacctcttaaaattagcagcaacccttgatcttacattgat

SEQ ID NO: 110811 - DNA, 80 bp, synthetic construct
  source 1..80: mol_type = other DNA
aaaagggaattttgtcatttgtgacaacatggatagaactggagattatgctaagtgaaataagccaggcacagaaagac

SEQ ID NO: 110812 - DNA, 80 bp, synthetic construct
  source 1..80: mol_type = other DNA
tgcacagagtggtgaatatagttaataatagtgtactgtacatttcaaaatcgctaagagtaaatttcaaatattctcac

SEQ ID NO: 110813 - DNA, 80 bp, synthetic construct; identical to SEQ ID NO: 21712
  source 1..80: mol_type = other DNA

SEQ ID NO: 110814 - DNA, 80 bp, synthetic construct
  source 1..80: mol_type = other DNA
aaagttttggccaagaaaaaagtgttaagactgctttttgattaattataataccttcacgtggtgtcatctctttgggc

SEQ ID NO: 110815 - DNA, 80 bp, synthetic construct
  source 1..80: mol_type = other DNA
gtagcgagattctgcatattactacaagatatttgttttggaaagatctaggactagatgcaaaaaaattgttttggagg

SEQ ID NO: 110816 - DNA, 80 bp, synthetic construct; identical to SEQ ID NO: 21713
  source 1..80: mol_type = other DNA

SEQ ID NO: 110817 - DNA, 80 bp, synthetic construct
  source 1..80: mol_type = other DNA
ctacaggcgcccgccaccgcgcccggctaattttttgtatttttagtagagacggggtttcaccgtgttagccaagatgg

SEQ ID NO: 110818 - DNA, 80 bp, synthetic construct
  source 1..80: mol_type = other DNA
cgatctcggctcattgcaagctccgcctcccgggttcacgccattctcctgcctcagcctctctgagtagctgggactac

SEQ ID NO: 110819 - DNA, 80 bp, synthetic construct; identical to SEQ ID NO: 21714
  source 1..80: mol_type = other DNA

SEQ ID NO: 110820 - DNA, 80 bp, synthetic construct
  source 1..80: mol_type = other DNA
tcacaaaattggaagtttctaattgaatttcctctaaggctggctgaaaaataggtcaagcgtttaatgccaattatagc

SEQ ID NO: 110821 - DNA, 80 bp, synthetic construct; identical to SEQ ID NO: 21715
  source 1..80: mol_type = other DNA

SEQ ID NO: 110822 - DNA, 80 bp, synthetic construct
  source 1..80: mol_type = other DNA
tgcaatttggctgtaaactactatggtttatttctataagctgcactagaaattggttccattattctttttgttataca

SEQ ID NO: 110823 - DNA, 80 bp, synthetic construct
  source 1..80: mol_type = other DNA
agtaatttacattttgaaaggcaattccacctcttgaccactagagggccaatgcgttgtattaagcaacatttttcggg

SEQ ID NO: 110824 - DNA, 80 bp, synthetic construct
  source 1..80: mol_type = other DNA
tcttcgggtgttggtagcaaaagggggataggaggagcaaccacaggagggatttctgaagaaaataaatgccgttagta

SEQ ID NO: 110825 - DNA, 80 bp, synthetic construct
  source 1..80: mol_type = other DNA
attgctcactgaagaatatgacatggaaggttttgttctgactctgctgcagtttggtcgctggtataaaatttcgtaca

SEQ ID NO: 110826 - DNA, 80 bp, synthetic construct; identical to SEQ ID NO: 21716
  source 1..80: mol_type = other DNA

SEQ ID NO: 110827 - DNA, 80 bp, synthetic construct
  source 1..80: mol_type = other DNA
tctgtggctattctatttaacatgattctagcatcagctgagtgagaccttattatctctaatttgccagactcacaagg

SEQ ID NO: 110828 - DNA, 80 bp, synthetic construct
  source 1..80: mol_type = other DNA
gcaaaataaaaaaaaaatgatatttttgtgttcagaatggtataggtaggctacgtgtttcgaagatggcagggtggctt

SEQ ID NO: 110829 - DNA, 80 bp, synthetic construct
  source 1..80: mol_type = other DNA
aatatacgtatgtgtttatttacacttgtcttttctaaaaaagcattctagatagaatgagagcatgagcgcatacaggg

SEQ ID NO: 110830 - DNA, 80 bp, synthetic construct; identical to SEQ ID NO: 21717
  source 1..80: mol_type = other DNA

SEQ ID NO: 110831 - DNA, 80 bp, synthetic construct
  source 1..80: mol_type = other DNA
ccatctttgtacccagttataaaatagcaagaaaagttcaaaaatccaaaatgagaagaaatgcactcttctttgcatca

SEQ ID NO: 110832 - DNA, 80 bp, synthetic construct
  source 1..80: mol_type = other DNA
caaacttgattgtactctacaacttattcctctgtgaaattctttcttgcctcagtaaaataatttttgctattcaggat

SEQ ID NO: 110833 - DNA, 80 bp, synthetic construct; identical to SEQ ID NO: 21718
  source 1..80: mol_type = other DNA

SEQ ID NO: 110834 - DNA, 80 bp, synthetic construct
  source 1..80: mol_type = other DNA
atgtcatatatttgtgtttcagcaactacgaatgggcaccaatagctgaaagcagatgctattatcatagccaaaatttt

SEQ ID NO: 110835 - DNA, 80 bp, synthetic construct
  source 1..80: mol_type = other DNA
agagaaagtcagactaagtcctataaacaaaatatcaattcctagccaagatcctccagatttacatctatgagatcttg

SEQ ID NO: 110836 - DNA, 80 bp, synthetic construct
  source 1..80: mol_type = other DNA
gtatgaactttgagatgaatactatgagaacgtgtgttgggaaataagaacacatgaccactttggtgtgtgtctacagg

SEQ ID NO: 110837 - DNA, 80 bp, synthetic construct; identical to SEQ ID NO: 21719
  source 1..80: mol_type = other DNA

SEQ ID NO: 110838 - DNA, 80 bp, synthetic construct
  source 1..80: mol_type = other DNA
tttaaatctcacaagtatttcataagccttttctaacttaccaattacagttagtttagcgctagcgatgtgtggaccac

SEQ ID NO: 110839 - DNA, 80 bp, synthetic construct
  source 1..80: mol_type = other DNA
aatttcaaagacagcatcattatctttcaaaactgtctgattttcaatgtccttgatcagagtgacaggctaggagaata

SEQ ID NO: 110840 - DNA, 80 bp, synthetic construct
  source 1..80: mol_type = other DNA
atacaagttcctcaaattccttttcgtccctctctgacctctctatttcctcaatttcctgagaagaacaaaaatgatag

SEQ ID NO: 110841 - DNA, 80 bp, synthetic construct; identical to SEQ ID NO: 21720
  source 1..80: mol_type = other DNA

SEQ ID NO: 110842 - DNA, 80 bp, synthetic construct
  source 1..80: mol_type = other DNA
acctgtcttctacttatttttaattgtctatcatcattcaaagattatatacttcattaaggttttctatgttctttatt

SEQ ID NO: 110843 - DNA, 80 bp, synthetic construct
  source 1..80: mol_type = other DNA
aaactttataaccaaagagcctagctaatgaattataatatcagaaaaaataataatagcaatggaaaactttaataata

SEQ ID NO: 110844 - DNA, 80 bp, synthetic construct
  source 1..80: mol_type = other DNA
agaaaaaaagtttcatacctaggcacagacaatactggggtttctttataggccatttctttttgtttaaaaatcttaat

SEQ ID NO: 110845 - DNA, 80 bp, synthetic construct
  source 1..80: mol_type = other DNA
ctcttgagagattctttttgtgaatgggacattacagtcatccctctctatgcctgggagattggcttcaggaggcctgt

SEQ ID NO: 110846 - DNA, 80 bp, synthetic construct; identical to SEQ ID NO: 21721
  source 1..80: mol_type = other DNA

SEQ ID NO: 110847 - DNA, 80 bp, synthetic construct
  source 1..80: mol_type = other DNA
gtggtgtccctaatctccagttttgcttcatcgcctttttggtggatgaaaacacgacctccttggttcagctgtctcca

SEQ ID NO: 110848 - DNA, 80 bp, synthetic construct
  source 1..80: mol_type = other DNA
gatgaagatgtacttctcatgaagtgcacttactttctacgactctgatactctgaggttctgacacaaaaaagagtctt

SEQ ID NO: 110849 - DNA, 80 bp, synthetic construct; identical to SEQ ID NO: 21722
  source 1..80: mol_type = other DNA

SEQ ID NO: 110850 - DNA, 80 bp, synthetic construct
  source 1..80: mol_type = other DNA
ttacatcttaatggatatggtgaaaagaagttcaagaaatagggtggtaaacttgtagtaatttcagatactttgtattg

SEQ ID NO: 110851 - DNA, 80 bp, synthetic construct
  source 1..80: mol_type = other DNA
ttttgaggtgtctgtacctttaatggtcacttttgatttggtagtgtcacttccagccacatttgaagctttacacacat

SEQ ID NO: 110852 - DNA, 80 bp, synthetic construct
  source 1..80: mol_type = other DNA
gtattctccttcactcactgttactggagtaaggtgctgatcaaatacaggtggcttcttaggttctggaattgaaaagg

SEQ ID NO: 110853 - DNA, 80 bp, synthetic construct
  source 1..80: mol_type = other DNA
ccacaagagaaacaaataaagagaaaaactggcctctaacaggtaacactgttgctgtagtaggacagaattatgtgcct

SEQ ID NO: 110854 - DNA, 80 bp, synthetic construct; identical to SEQ ID NO: 21723
  source 1..80: mol_type = other DNA

SEQ ID NO: 110855 - DNA, 80 bp, synthetic construct
  source 1..80: mol_type = other DNA
ttagcccaagggaattaggagttgaggctcagtgtttaactgaagaccaatgatgaagacattgatgagtaacatgatag

SEQ ID NO: 110856 - DNA, 80 bp, synthetic construct
  source 1..80: mol_type = other DNA
aaagcatttatctgcccatggtaaaaccatcatgagtgtaaatcatgaagataagccactgctaagtatatatttttcat

SEQ ID NO: 110857 - DNA, 80 bp, synthetic construct; identical to SEQ ID NO: 21724
  source 1..80: mol_type = other DNA

SEQ ID NO: 110858 - DNA, 80 bp, synthetic construct
  source 1..80: mol_type = other DNA
acccattatttttctttttgggcaaatgttacccttttgtctgggattaatatttgtttgcaggtcaaacgctttgggca

SEQ ID NO: 110859 - DNA, 80 bp, synthetic construct
  source 1..80: mol_type = other DNA
catatgcacacatttcagagtacgctgaaacttctaactacctaaaggaattttaggatatgatttagaaacctaagata

SEQ ID NO: 110860 - DNA, 80 bp, synthetic construct
  source 1..80: mol_type = other DNA
atatataacaggcagtgaagaaaaacacaacaggttggggctgtgaggataactcacctttgatgacgattgaagacgtg

SEQ ID NO: 110861 - DNA, 80 bp, synthetic construct; identical to SEQ ID NO: 21725
  source 1..80: mol_type = other DNA

SEQ ID NO: 110862 - DNA, 80 bp, synthetic construct
  source 1..80: mol_type = other DNA
tatgttcctaaacatttcagcctccttctacgagcttattctaaactgttctttgacttacaaggtggatgataagaagt

SEQ ID NO: 110863 - DNA, 80 bp, synthetic construct
  source 1..80: mol_type = other DNA
tgaggtcaggagctccagaccaacctggccaacatggtgaaaccccgtttctaccaaaaaatacaaaaattagttggtca

SEQ ID NO: 110864 - DNA, 80 bp, synthetic construct
  source 1..80: mol_type = other DNA
agaatgagatcctgtctcgaggaaagaaagaaatacagatttaaaaaatgacttcttctctagataaacttatttcctct

SEQ ID NO: 110865 - DNA, 80 bp, synthetic construct
  source 1..80: mol_type = other DNA
tcccacttcattcacagcatagcaggtatattgtccagaatctcctttgtctactttgaggactgtcaggtgggcgctgt

SEQ ID NO: 110866 - DNA, 80 bp, synthetic construct; identical to SEQ ID NO: 21726
  source 1..80: mol_type = other DNA

SEQ ID NO: 110867 - DNA, 80 bp, synthetic construct
  source 1..80: mol_type = other DNA
attctagaaatgaaagtttaagaatccacaaacctgtgagaatgagcctggcactggaagaagcagagcctatagggttt

SEQ ID NO: 110868 - DNA, 80 bp, synthetic construct
  source 1..80: mol_type = other DNA
cacaatcaaaaacaactggcagtccaactgtttcttgaacatctctcaattgtcgagaaaatgatggtggaagtttttgc

SEQ ID NO: 110869 - DNA, 80 bp, synthetic construct; identical to SEQ ID NO: 21727
  source 1..80: mol_type = other DNA

SEQ ID NO: 110870 - DNA, 80 bp, synthetic construct
  source 1..80: mol_type = other DNA
tccaattaaagatttagtcatattatctctctgtagaatccatagaaaaagataagccactaactgtaaataggattact

SEQ ID NO: 110871 - DNA, 80 bp, synthetic construct
  source 1..80: mol_type = other DNA
acggtaaggaaagttgatgcagaaacttctcccacgctgttttcagctttgcagatatattctccactatcattaatatc

SEQ ID NO: 110872 - DNA, 80 bp, synthetic construct
  source 1..80: mol_type = other DNA
accggctccaactgcttgacaaaatacggtggttctgcagccaagagagataatcaatcagtcatgaaggagacatgcca

SEQ ID NO: 110873 - DNA, 80 bp, synthetic construct
  source 1..80: mol_type = other DNA
tttcagtcgtagttatattacacctctgagaaggagttacatttatgccatttttcttccaggtaaccgaaatgggagga

SEQ ID NO: 110874 - DNA, 80 bp, synthetic construct; identical to SEQ ID NO: 21728
  source 1..80: mol_type = other DNA

SEQ ID NO: 110875 - DNA, 80 bp, synthetic construct
  source 1..80: mol_type = other DNA
ccagctaacactgaaaggaggtgttccttttacgatacttgtgaaagttacattggtcccagttaaaacatccatgggat

SEQ ID NO: 110876 - DNA, 80 bp, synthetic construct
  source 1..80: mol_type = other DNA
tgttttgtaaactgacctctcacagtcaaaggagcactacattcatcagaaccagccatattagtagctatacatgtgta

SEQ ID NO: 110877 - DNA, 80 bp, synthetic construct; identical to SEQ ID NO: 21729
  source 1..80: mol_type = other DNA

SEQ ID NO: 110878 - DNA, 80 bp, synthetic construct
  source 1..80: mol_type = other DNA
atcagtgggcagaatgtgatggttgacttgctagggattttgttctctctttgccgtgaagaattatgtggtgaattatt

SEQ ID NO: 110879 - DNA, 80 bp, synthetic construct
  source 1..80: mol_type = other DNA
tacagatggtattgcctctgaatttgctgattcagaagatgtcggactcatgttatcctatagaagatgtaacaacccat

SEQ ID NO: 110880 - DNA, 80 bp, synthetic construct
  source 1..80: mol_type = other DNA
atgatcttaaggccggatactttgttgaagaagcttattttgtatttgttgtcacttgttagctcttttccatccttaaa

SEQ ID NO: 110881 - DNA, 80 bp, synthetic construct; identical to SEQ ID NO: 21730
  source 1..80: mol_type = other DNA

SEQ ID NO: 110882 - DNA, 80 bp, synthetic construct
  source 1..80: mol_type = other DNA
ttgtcactttctctaacgatttctcccttatctttgaaccacaccactgaaatgggttcagcgccttcaatggtagtctg

SEQ ID NO: 110883 - DNA, 80 bp, synthetic construct
  source 1..80: mol_type = other DNA
tgctcaaatcgtgaatgccgggaatcaaactagtgataatgtgttatttccatttaagaggcatttttggtggatgcgag

SEQ ID NO: 110884 - DNA, 80 bp, synthetic construct
  source 1..80: mol_type = other DNA
aacaaagggaaagtggaataggctgctagtgataagactgggctggggtggagggggcaacagagtattacaattagaag

SEQ ID NO: 110885 - DNA, 80 bp, synthetic construct; identical to SEQ ID NO: 21731
  source 1..80: mol_type = other DNA

SEQ ID NO: 110886 - DNA, 80 bp, synthetic construct
  source 1..80: mol_type = other DNA
gatagagagtgaaaaaaacactttcaattctttgttgtgtcctttccctattttaaaacatcgttgaagagtcaaacagg

SEQ ID NO: 110887 - DNA, 80 bp, synthetic construct
  source 1..80: mol_type = other DNA
tttccagcacagccaccgagtcaacgaatgacattctgaatttactgctctcttgaatttcagtctcgtccttataccat

SEQ ID NO: 110888 - DNA, 80 bp, synthetic construct
  source 1..80: mol_type = other DNA
tcaagatgaggtggaaaaaataatctttgctagagaggtctttagctctggaaaacaaatttatgcagttcaaggaagaa

SEQ ID NO: 110889 - DNA, 80 bp, synthetic construct; identical to SEQ ID NO: 21732
  source 1..80: mol_type = other DNA

SEQ ID NO: 110890 - DNA, 80 bp, synthetic construct
  source 1..80: mol_type = other DNA
tgaagtgtgtgagagtaatgatttcctcattaactgaagcaaaaaattcaggcatagggaagtaaaagtgattagctata

SEQ ID NO: 110891 - DNA, 80 bp, synthetic construct
  source 1..80: mol_type = other DNA
cagaaacacatgactgccttccataatagcagatactgatctacttactccccagcccctgacctccactattatttaag

SEQ ID NO: 110892 - DNA, 80 bp, synthetic construct
  source 1..80: mol_type = other DNA
cctatgataccgtctttcaaactaggattttcttgcaattttgtagagtttcggttatctctctctagtctctattttta

SEQ ID NO: 110893 - DNA, 80 bp, synthetic construct; identical to SEQ ID NO: 21733
  source 1..80: mol_type = other DNA

SEQ ID NO: 110894 - DNA, 80 bp, synthetic construct
  source 1..80: mol_type = other DNA
aagtgattttgattggtgcagtcccagttacatgacatttaaaagtaccactttctccaagagcaagatctactgataca

SEQ ID NO: 110895 - DNA, 80 bp, synthetic construct
  source 1..80: mol_type = other DNA
tgtgagttactcacctgagagaatgagcttggcactggatgaagcagtcccaagaggattagaagcagagcaattatact

SEQ ID NO: 110896 - DNA, 80 bp, synthetic construct
  source 1..80: mol_type = other DNA
gaagcctagagtctcatgaacgtctttcagttttcttgcaaagaaaggtggaagtttgcgcgctgtaaagaagttacaga

SEQ ID NO: 110897 - DNA, 80 bp, synthetic construct; identical to SEQ ID NO: 21734
  source 1..80: mol_type = other DNA

SEQ ID NO: 110898 - DNA, 80 bp, synthetic construct
  source 1..80: mol_type = other DNA
acaaaggatggtagtcagcaagtcagtcatgccatgtaaaagaggatgtttgaaaagaaagagagcaataaaaagaggta

SEQ ID NO: 110899 - DNA, 80 bp, synthetic construct
  source 1..80: mol_type = other DNA
gtagatttttctgtcatagtaatactgcatctctcagattgtgaaataagatactcgtcctttatccagctcactgagat

SEQ ID NO: 110900 - DNA, 80 bp, synthetic construct
  source 1..80: mol_type = other DNA
tgtatatattgggggaaagagcaaacctttcacaaaaagatgtgtggtacaggaagcactgccagcatcatttgtaacga

SEQ ID NO: 110901 - DNA, 80 bp, synthetic construct
  source 1..80: mol_type = other DNA
gaatgtgaggctcattccaggcaaaacttccacagaatcaggggtttgttcaaaagatggtggttctagatattgcaagg

SEQ ID NO: 110902 - DNA, 80 bp, synthetic construct; identical to SEQ ID NO: 21735
  source 1..80: mol_type = other DNA

SEQ ID NO: 110903 - DNA, 80 bp, synthetic construct
  source 1..80: mol_type = other DNA
tacagacgttttccgaaaagctggactgacatttgggcccactaacaatctcatttccatcctgaaaccagccaactgaa

SEQ ID NO: 110904 - DNA, 80 bp, synthetic construct
  source 1..80: mol_type = other DNA
ccccctggaaatattgtatattcataaaaatctcattctactcaccagaaacatggacggatacagtgcagttacttttg

SEQ ID NO: 110905 - DNA, 80 bp, synthetic construct; identical to SEQ ID NO: 21736
  source 1..80: mol_type = other DNA

SEQ ID NO: 110906 - DNA, 80 bp, synthetic construct
  source 1..80: mol_type = other DNA
cagtcaagactgcagagcattctctcattccagcatcgtttttgatttggcatatatattttccagaattagatgcttct

SEQ ID NO: 110907 - DNA, 80 bp, synthetic construct
  source 1..80: mol_type = other DNA
aggtgtcacttagctttttcacgaatcgtggaggttctgatgaaagaaatttgtggttagaggaaaaaatgtgagaatca

SEQ ID NO: 110908 - DNA, 80 bp, synthetic construct
  source 1..80: mol_type = other DNA
ttagtagctttgcagtgatattccccgacatcggaggcttcaagattaaggatatgaagacttgtatcaaaatgttttga

SEQ ID NO: 110909 - DNA, 80 bp, synthetic construct; identical to SEQ ID NO: 21737
  source 1..80: mol_type = other DNA

SEQ ID NO: 110910 - DNA, 80 bp, synthetic construct
  source 1..80: mol_type = other DNA
agagcccaaatcagaggagaataaagaaacaaagaagcttagtgtgtctaacctttcactgtcaacgctgtgctgcagct

SEQ ID NO: 110911 - DNA, 80 bp, synthetic construct
  source 1..80: mol_type = other DNA
tctggggagccacttattttacattccagttgaatggattctccctgctttgcaacttttgaagcttctaatttcttaac

SEQ ID NO: 110912 - DNA, 80 bp, synthetic construct
  source 1..80: mol_type = other DNA
gttatcttttaagttaaataatctcataacattttttttttagttttttaaaatttattattattatactttaagtttta

SEQ ID NO: 110913 - DNA, 80 bp, synthetic construct
  source 1..80: mol_type = other DNA
ctagatagttaaaacaacatttaacaaatttcaattaaacaatactttttgataagattacacttagagttacactaatg

SEQ ID NO: 110914 - DNA, 80 bp, synthetic construct; identical to SEQ ID NO: 21738
  source 1..80: mol_type = other DNA

SEQ ID NO: 110915 - DNA, 80 bp, synthetic construct
  source 1..80: mol_type = other DNA
cactttctccagcaataacatctatagatacaggcttgatgtcaaagaagggagatttcttgggttctggaggatgagaa

SEQ ID NO: 110916 - DNA, 80 bp, synthetic construct
  source 1..80: mol_type = other DNA
gctgagcaagagtactggccagagtgactcaagtcagtttgcaaaatttttaaagttgccacattatctacaaatgaagt

SEQ ID NO: 110917 - DNA, 80 bp, synthetic construct
  source 1..80: mol_type = other DNA
ctttaattgtcttgcaaaagaaggtgggagttggcgctctgtagggagacatgtaatacttaaggtgttaggagatgaaa

SEQ ID NO: 110918 - DNA, 80 bp, synthetic construct; identical to SEQ ID NO: 21739
  source 1..80: mol_type = other DNA

SEQ ID NO: 110919 - DNA, 80 bp, synthetic construct
  source 1..80: mol_type = other DNA
aactatgctacatgttagaagaatgcaaatgatttaagagacaataagacaacacacctaatgtagataccagagctcca

SEQ ID NO: 110920 - DNA, 80 bp, synthetic construct
  source 1..80: mol_type = other DNA
aaattggaagtgttccagtgtaggtgctctccagaattatggacttccctggttctacagaatgatcacttaatctcttc

SEQ ID NO: 110921 - DNA, 80 bp, synthetic construct
  source 1..80: mol_type = other DNA
ccacacaggtgtattccccactctgagatatgtcaatattaaataattccagttctgccacagtgtcttcaaaatagatg

SEQ ID NO: 110922 - DNA, 80 bp, synthetic construct
  source 1..80: mol_type = other DNA
tcaggttctttcacaaaagagggtggttctatatagacatggagaacaattaaaagatcctgtaagcttcagatggagtt

SEQ ID NO: 110923 - DNA, 80 bp, synthetic construct; identical to SEQ ID NO: 21740
  source 1..80: mol_type = other DNA

SEQ ID NO: 110924 - DNA, 80 bp, synthetic construct
  source 1..80: mol_type = other DNA
cagtcttcgtgtgaaagagggaggaactgctcggtctgtgtgaggaaaggtaagagactcatcatgatttgaaagaatag

SEQ ID NO: 110925 - DNA, 80 bp, synthetic construct
  source 1..80: mol_type = other DNA
gagagaatccttaaggaagagattttgttgtagaagctaaatttgtgtttttggctgctggtcaacagctttccatcctt

SEQ ID NO: 110926 - DNA, 80 bp, synthetic construct; identical to SEQ ID NO: 21741
  source 1..80: mol_type = other DNA

SEQ ID NO: 110927 - DNA, 80 bp, synthetic construct
  source 1..80: mol_type = other DNA
ttcaaaacaatttaaacaatgtgcattagatagtatatattgatttccacttgaccctctgtagatcaaagtctacaggt

SEQ ID NO: 110928 - DNA, 80 bp, synthetic construct
  source 1..80: mol_type = other DNA
tgccaacctttggagttcttgttagttttaacaattactcttgtagcacatgctgggctctgtattctttcatgcttaat

SEQ ID NO: 110929 - DNA, 80 bp, synthetic construct
  source 1..80: mol_type = other DNA
atagttctagaagaaactcagaaaaagaatctgccagtaactcttagtaattcattccagcatttggcaccagtttctat

SEQ ID NO: 110930 - DNA, 80 bp, synthetic construct; identical to SEQ ID NO: 21742
  source 1..80: mol_type = other DNA

SEQ ID NO: 110931 - DNA, 80 bp, synthetic construct
  source 1..80: mol_type = other DNA
gtggatgaactatatttacctttcaattttacagtacaaacacaagtatcacttcccacttcattctgtgctttgcagtg

SEQ ID NO: 110932 - DNA, 80 bp, synthetic construct
  source 1..80: mol_type = other DNA
acttcagcatttttaagggtttctactataggagggaagctgctaaaaacaggtggctctgcaaaaaacaagaatttctc

SEQ ID NO: 110933 - DNA, 80 bp, synthetic construct
  source 1..80: mol_type = other DNA
gatgggcagagaacccagatagatcctagatgtcgttactgaacagttcaacattctatctactacaccttactgatgta

SEQ ID NO: 110934 - DNA, 80 bp, synthetic construct; identical to SEQ ID NO: 21743
  source 1..80: mol_type = other DNA

SEQ ID NO: 110935 - DNA, 80 bp, synthetic construct
  source 1..80: mol_type = other DNA
cataagtttaaaacctgtattgctttcactttgcatagatatagtaaaagtgcttgttattaatgatatagattatagtg

SEQ ID NO: 110936 - DNA, 80 bp, synthetic construct
  source 1..80: mol_type = other DNA
tagttacatgtaagcaaaattcaagaaggaaaccatctaaaaagggaaataatactagctcagaaaaatattctatgatc

SEQ ID NO: 110937 - DNA, 80 bp, synthetic construct
  source 1..80: mol_type = other DNA
atgaaatctccactgtcctcagtactgagattgttcatctgtatgacggccactgagtcaatgaaagtcattctgtactt

SEQ ID NO: 110938 - DNA, 80 bp, synthetic construct
  source 1..80: mol_type = other DNA
tttctttacaaactttggtggttctaaagagtcaggaaagaggagagtatcagggaacagaaataaataacaatagttaa

SEQ ID NO: 110939 - DNA, 80 bp, synthetic construct; identical to SEQ ID NO: 21744
  source 1..80: mol_type = other DNA

SEQ ID NO: 110940 - DNA, 80 bp, synthetic construct
  source 1..80: mol_type = other DNA
ctgtcgcccaggtttcactaggaagcttggtggttctatagattttaagagagatatatttaattaaattgcttgcagtt

SEQ ID NO: 110941 - DNA, 80 bp, synthetic construct
  source 1..80: mol_type = other DNA
attcgcaaggaagaatcaagaagaggtaaagaaattctaacctttcacagttaagatgccactgcatgcatcatctcctg

SEQ ID NO: 110942 - DNA, 80 bp, synthetic construct
  source 1..80: mol_type = other DNA
agacaccttgcactccatatgaatagaagagcccagaactttatccattttggttaattttttggtgaatgatggaggaa

SEQ ID NO: 110943 - DNA, 80 bp, synthetic construct; identical to SEQ ID NO: 21745
  source 1..80: mol_type = other DNA

SEQ ID NO: 110944 - DNA, 80 bp, synthetic construct
  source 1..80: mol_type = other DNA
aatgaaaatgtggatgagttacattggtaactccactagaaataatgtctgctaatgaaactgtcgctatagactatctt

SEQ ID NO: 110945 - DNA, 80 bp, synthetic construct
  source 1..80: mol_type = other DNA
tatcatcttcatcaagaatctgatcatcctttagccaggttatagaaataggaggagaacctgccacggtactctgaaag

SEQ ID NO: 110946 - DNA, 80 bp, synthetic construct
  source 1..80: mol_type = other DNA
tgcttcttgtataactgacctttcagggcaactctagtactgcatgagcagctgccgccttcattggatacaatgcactg

SEQ ID NO: 110947 - DNA, 80 bp, synthetic construct; identical to SEQ ID NO: 21746
  source 1..80: mol_type = other DNA

SEQ ID NO: 110948 - DNA, 80 bp, synthetic construct
  source 1..80: mol_type = other DNA
ggcaccagaaatctggaaagtggctaaaccatcaatgaaggaaatgccatgtttctgaatggctgttatttcattcccgt

SEQ ID NO: 110949 - DNA, 80 bp, synthetic construct
  source 1..80: mol_type = other DNA
aagatggaaaaagaattgtgatgttgaatatttttaaaaacaggtcactgggcaaaactgctgtcttaagcgtcccccgc

SEQ ID NO: 110950 - DNA, 80 bp, synthetic construct
  source 1..80: mol_type = other DNA
ggctgctcctgagtgtaactctttgttatctttaaaccactttattgtcatgggtgcagtgccacccacaagagccttta

SEQ ID NO: 110951 - DNA, 80 bp, synthetic construct; identical to SEQ ID NO: 21747
  source 1..80: mol_type = other DNA

SEQ ID NO: 110952 - DNA, 80 bp, synthetic construct
  source 1..80: mol_type = other DNA
tctttgaaccactggatgcttatgggatgtgacccagccactatacattctaaatcaatgaaagaacctttaatgctgtc

SEQ ID NO: 110953 - DNA, 80 bp, synthetic construct
  source 1..80: mol_type = other DNA
aagggaagaaggagcatggaaatgcccaatcctctctgtagaagaacaataccaacctaatacattaattctagccttgc

SEQ ID NO: 110954 - DNA, 80 bp, synthetic construct; identical to SEQ ID NO: 21748
  source 1..80: mol_type = other DNA

SEQ ID NO: 110955 - DNA, 80 bp, synthetic construct
  source 1..80: mol_type = other DNA
tactgagagtaatgcagaacatctttgtattcctgcatcatttttggcctgacagacatatttcccatcatgcttgactt

SEQ ID NO: 110956 - DNA, 80 bp, synthetic construct
  source 1..80: mol_type = other DNA
ggtactctcgatcttctttatgaaggatgggggttctaacagaagaatgaattctcaatcaatattatccctatagcaaa

SEQ ID NO: 110957 - DNA, 80 bp, synthetic construct
  source 1..80: mol_type = other DNA
tctgcaggctaaccagatgatcctgaatgaaagtcttatactttctaccacttcgcaggattgtgttatctttgaaccaa

SEQ ID NO: 110958 - DNA, 80 bp, synthetic construct
  source 1..80: mol_type = other DNA
taactttggcaacacaagaggcaaagtgaacacaaacctttgactattacaatgctactgcagtggtcactgccagcctc

SEQ ID NO: 110959 - DNA, 80 bp, synthetic construct; identical to SEQ ID NO: 21749
  source 1..80: mol_type = other DNA

SEQ ID NO: 110960 - DNA, 80 bp, synthetic construct
  source 1..80: mol_type = other DNA
acaatgcaaaccttttacaaacaagtttgcactgcattccacccctccagcgacattgctgactttacatgtgtacgtgc

SEQ ID NO: 110961 - DNA, 80 bp, synthetic construct
  source 1..80: mol_type = other DNA
gccaggcagaacatcctttgagccgggtttagttacaaaactgggtggttctgaagaaggggtataagaaagaatttcaa

SEQ ID NO: 110962 - DNA, 80 bp, synthetic construct
  source 1..80: mol_type = other DNA
cattcatgtctactctgatgatctccaaagaggctgtgccttccacaaatgctatcctgtatctgtcagaagcagctatt

SEQ ID NO: 110963 - DNA, 80 bp, synthetic construct; identical to SEQ ID NO: 21750
  source 1..80: mol_type = other DNA

SEQ ID NO: 110964 - DNA, 80 bp, synthetic construct
  source 1..80: mol_type = other DNA
acattgtttttaaaacttattcggtattttttactggcgaccaagggtctcccatctttgtaccatttgggcttcagttc

SEQ ID NO: 110965 - DNA, 80 bp, synthetic construct
  source 1..80: mol_type = other DNA
gaggtttaaatgttcctacacaaacctttaactattaattccccaacagatgtttggcttccagcttcattttcagccag

SEQ ID NO: 110966 - DNA, 80 bp, synthetic construct; identical to SEQ ID NO: 21751
  source 1..80: mol_type = other DNA

SEQ ID NO: 110967 - DNA, 80 bp, synthetic construct
  source 1..80: mol_type = other DNA
aggcatagatgatacatgtttgtcagctgacaaaatggcttattattcccttttgttatcagataatagatatttacact

SEQ ID NO: 110968 - DNA, 80 bp, synthetic construct
  source 1..80: mol_type = other DNA
tagtttttcaagcactaacctttgagtaagtgggttgccatgcagccacacttgccgacttcattagcaacaacacattc

SEQ ID NO: 110969 - DNA, 80 bp, synthetic construct
  source 1..80: mol_type = other DNA
gcatttgttcctctcactatgtctgcaggctcaagagttttgatgaaagaaggaggttctacaaaagcatgaaagcattg

SEQ ID NO: 110970 - DNA, 80 bp, synthetic construct; identical to SEQ ID NO: 21752
  source 1..80: mol_type = other DNA

SEQ ID NO: 110971 - DNA, 80 bp, synthetic construct
  source 1..80: mol_type = other DNA
aaataagagggatccaccttcttcacgaaggatggtggctctacatgaagtttacaaaaaagaaaaaggagaagatatct

SEQ ID NO: 110972 - DNA, 80 bp, synthetic construct
  source 1..80: mol_type = other DNA
ataaacagactacctacacaaagaagaattttataaaagaagatagttaagaattgctcagacacttggagttttttctt

SEQ ID NO: 110973 - DNA, 80 bp, synthetic construct
  source 1..80: mol_type = other DNA
gactgaattgtttgccaacagtttttctactgaggattccttgcagagaagggactagaaaatacattcacacgtttctt

SEQ ID NO: 110974 - DNA, 80 bp, synthetic construct
  source 1..80: mol_type = other DNA
ttcaaaacagatcttataatctttccctggggggagtttttgcccatctttgctccacgtaactgtgacttttctgtctt

SEQ ID NO: 110975 - DNA, 80 bp, synthetic construct; identical to SEQ ID NO: 21753
  source 1..80: mol_type = other DNA

SEQ ID NO: 110976 - DNA, 80 bp, synthetic construct
  source 1..80: mol_type = other DNA
gttgtaagggacttaggtctggagagaaaggttggtggatatgcctctgcaaaagaaatttttccagcattacatttagt

SEQ ID NO: 110977 - DNA, 80 bp, synthetic construct
  source 1..80: mol_type = other DNA
gtcaaaggaaagggatgagagtgttctttataagggagcaagacatcactttacttgtctctatcaaagaaaagacaagc

SEQ ID NO: 110978 - DNA, 80 bp, synthetic construct; identical to SEQ ID NO: 21754
  source 1..80: mol_type = other DNA

SEQ ID NO: 110979 - DNA, 80 bp, synthetic construct
  source 1..80: mol_type = other DNA
taagtcatcctccttatcctttcctcttattatctgaagcttcaatattagtcgcattcctaaattgacctaatttgagt

SEQ ID NO: 110980 - DNA, 80 bp, synthetic construct
  source 1..80: mol_type = other DNA
catcgttttcacattcaagagatgtgctgcatttgcccttccccttgatattctcattgacaaagaagaccaagggacag

SEQ ID NO: 110981 - DNA, 80 bp, synthetic construct
  source 1..80: mol_type = other DNA
gaaggtaggaagaaaggaagaaaagcttgctactaatattttggttaatgaaggcattcaagtatttgatgagtgttaac

SEQ ID NO: 110982 - DNA, 80 bp, synthetic construct
  source 1..80: mol_type = other DNA
ggagagcagtggtgcaatcctggcttactgcaacctctgcctcctggcttcaagcaattctcctgcctcagcctcccaag

SEQ ID NO: 110983 - DNA, 80 bp, synthetic construct; identical to SEQ ID NO: 21755
  source 1..80: mol_type = other DNA

SEQ ID NO: 110984 - DNA, 80 bp, synthetic construct
  source 1..80: mol_type = other DNA
gcaccaaactgtcctgatatgttttatatgaagggccaagctgagctcatttgattacttaactttgttctcaaataata

SEQ ID NO: 110985 - DNA, 80 bp, synthetic construct
  source 1..80: mol_type = other DNA
ggacaacaatatgaaatgaagtgacaacatctgtgccaatgtatggcatttacctgtcacagttagtgtggctgtacagc

SEQ ID NO: 110986 - DNA, 80 bp, synthetic construct
  source 1..80: mol_type = other DNA
cataaatttctcggccagctttaaaccactggaaccggacattgggagcactttggatctcacaggtgaatttggctagg

SEQ ID NO: 110987 - DNA, 80 bp, synthetic construct; identical to SEQ ID NO: 21756
  source 1..80: mol_type = other DNA

SEQ ID NO: 110988 - DNA, 80 bp, synthetic construct
  source 1..80: mol_type = other DNA
aaacagacaactaatcatggttattttaaatctaagggtgagaccagtgatttcagagtggctaggtgttcactgatact

SEQ ID NO: 110989 - DNA, 80 bp, synthetic construct
  source 1..80: mol_type = other DNA
tagcatagcacccaacagggcagtaagggaaaaggtgagttcataaccatgattatgtctgtgatttcattcttactcta

SEQ ID NO: 110990 - DNA, 80 bp, synthetic construct; identical to SEQ ID NO: 21757
  source 1..80: mol_type = other DNA

SEQ ID NO: 110991 - DNA, 80 bp, synthetic construct
  source 1..80: mol_type = other DNA
tgattaagccaccctcagcttcctgtatctttactgtagcaacctcctcagtaccactttcagaggaagactcctctttt

SEQ ID NO: 110992 - DNA, 80 bp, synthetic construct
  source 1..80: mol_type = other DNA
acctcttcagttgagatcagatatttagattcaacttctggttcagtaatgggttcaaccttctgtgaacctgaaaaaga

SEQ ID NO: 110993 - DNA, 80 bp, synthetic construct
  source 1..80: mol_type = other DNA
gttagccatttgaggatcaacatcttcaataatgatggttacttcttctgttacagactttgccgaagtaacaaggtaca

SEQ ID NO: 110994 - DNA, 80 bp, synthetic construct; identical to SEQ ID NO: 21758
  source 1..80: mol_type = other DNA

SEQ ID NO: 110995 - DNA, 80 bp, synthetic construct
  source 1..80: mol_type = other DNA
ttctgaccgcagaatcttgccctgcattttccagtggatttgcactttctatcaaaattttacctccttctgtgcatgag

SEQ ID NO: 110996 - DNA, 80 bp, synthetic construct
  source 1..80: mol_type = other DNA
atactgtcttttcttttggtgaaagtacttcctcagccacagaggttagataagaatgcattggaggttctattgaagac

SEQ ID NO: 110997 - DNA, 80 bp, synthetic construct
  source 1..80: mol_type = other DNA
agaaggttttctgggactgtacaatctgcagctgtaggttgggagatggttccttgagaggctgaaagtgaatactgcca

SEQ ID NO: 110998 - DNA, 80 bp, synthetic construct
  source 1..80: mol_type = other DNA
ctttcaaaatggtgtcttttacaaacgttgcaatttcctgctctgagtcaagtgcttcaactgcgggaccctttaagggt

SEQ ID NO: 110999 - DNA, 80 bp, synthetic construct; identical to SEQ ID NO: 21759
  source 1..80: mol_type = other DNA

SEQ ID NO: 111000 - DNA, 80 bp, synthetic construct
  source 1..80: mol_type = other DNA
ggacctcccagcttttccagagattttgccactgctgattctgtttcagtgtctttgtgaccctctcctttggaattaat

SEQ ID NO: 111001 - DNA, 80 bp, synthetic construct
  source 1..80: mol_type = other DNA
aaatttgtagtcagcagaaggggttaatagcactccattaaagaaccactgaattttaggtttggggatgccaatgacag

SEQ ID NO: 111002 - DNA, 80 bp, synthetic construct; identical to SEQ ID NO: 21760
  source 1..80: mol_type = other DNA

SEQ ID NO: 111003 - DNA, 80 bp, synthetic construct
  source 1..80: mol_type = other DNA
caaaattatagatactgtacaaaagcaatttttgatccacttcatctgtgatagagttcatgttttaaaaatgctctcat

SEQ ID NO: 111004 - DNA, 80 bp, synthetic construct
  source 1..80: mol_type = other DNA
ctgcctctaaagtcattattaaaaataagaggctacaggaaatgtttaatttggatttgtaagagaaccactgttttcag

SEQ ID NO: 111005 - DNA, 80 bp, synthetic construct
  source 1..80: mol_type = other DNA
atacagaaccactgagcaagaaacaaagcagtgcataacagagactctttaaacagtatcctggatgacaggatgaaaga

SEQ ID NO: 111006 - DNA, 80 bp, synthetic construct; identical to SEQ ID NO: 21761
  source 1..80: mol_type = other DNA

SEQ ID NO: 111007 - DNA, 80 bp, synthetic construct
  source 1..80: mol_type = other DNA
ttacctttcccttcacttgaactcacaaaatatctgtaaagggagtgaatgtgaatacagttaaaatacccttactcact

SEQ ID NO: 111008 - DNA, 80 bp, synthetic construct
  source 1..80: mol_type = other DNA
atgtgctgaaacttgaaaggcatagtttaaaaaattacatgttgtggtagcagctattaattgtctaaactcaactatgt

SEQ ID NO: 111009 - DNA, 80 bp, synthetic construct
  source 1..80: mol_type = other DNA
ccaaggcttacttttctttattcagtcactgttattctgcgtatactcaagctcaccatacttgaaactaacagaattac

SEQ ID NO: 111010 - DNA, 80 bp, synthetic construct
  source 1..80: mol_type = other DNA
tgtttgagtaaagcatgcttgtcatgtttgcctcaatctgagtttctcgttaattttaacatccattatgtgactaagtg

SEQ ID NO: 111011 - DNA, 80 bp, synthetic construct; identical to SEQ ID NO: 21762
  source 1..80: mol_type = other DNA

SEQ ID NO: 111012 - DNA, 80 bp, synthetic construct
  source 1..80: mol_type = other DNA
ttttaaatatgataatggtacttaaatattgctaaatgcaggtgacaaatgtagccattaagtaacaataagtaatttaa

SEQ ID NO: 111013 - DNA, 80 bp, synthetic construct
  source 1..80: mol_type = other DNA
cccttcattttcagaattttttatatttgtcgagtcttatatgagaagacttgggtccacattagtatataggtaagata

SEQ ID NO: 111014 - DNA, 80 bp, synthetic construct
  source 1..80: mol_type = other DNA
ttatttatatataatctgaaatacaaattaccatattgtctcaattctaaaaatatcccacctttttttaaattttaaag

SEQ ID NO: 111015 - DNA, 80 bp, synthetic construct; identical to SEQ ID NO: 21763
  source 1..80: mol_type = other DNA

SEQ ID NO: 111016 - DNA, 80 bp, synthetic construct
  source 1..80: mol_type = other DNA
gagtttggatgcaaaggggttaaaattccaaaaataacttagaatgggagcagagagatttgcccttaccaatttgtctg

SEQ ID NO: 111017 - DNA, 80 bp, synthetic construct
  source 1..80: mol_type = other DNA
tacaaacaattaggtagccaaggagagatttaattgtgtttgatattacacagcatgattgacacaagtgatgattccac

SEQ ID NO: 111018 - DNA, 80 bp, synthetic construct
  source 1..80: mol_type = other DNA
atgctaataattactgaggcactaaaacattacattttaagttaaggtgagtgctgcaaagctctcagccattcctgatt

SEQ ID NO: 111019 - DNA, 80 bp, synthetic construct
  source 1..80: mol_type = other DNA
aactaagcactgaaaatatgctgctgtacctattggtgcataacagtcagaaatacctttgataaacctgggaggccctt

SEQ ID NO: 111020 - DNA, 80 bp, synthetic construct; identical to SEQ ID NO: 21764
  source 1..80: mol_type = other DNA

SEQ ID NO: 111021 - DNA, 80 bp, synthetic construct
  source 1..80: mol_type = other DNA
cgctaatcacgtatttaatattatctggctcaatacacatatattctttataccacttaacttcgggagtcgggatccct

SEQ ID NO: 111022 - DNA, 80 bp, synthetic construct
  source 1..80: mol_type = other DNA
gaagaacatctagactcacaatcatacttttatggtcaggagtaaattcgggaactgtcactattttcacctgcttctca

SEQ ID NO: 111023 - DNA, 80 bp, synthetic construct; identical to SEQ ID NO: 21765
  source 1..80: mol_type = other DNA

SEQ ID NO: 111024 - DNA, 80 bp, synthetic construct
  source 1..80: mol_type = other DNA
acaatgaagcctagtgttgtgttttcatataccttccttttggtcagaggttcaataaaagatggaggcatttcattgtc

SEQ ID NO: 111025 - DNA, 80 bp, synthetic construct
  source 1..80: mol_type = other DNA
tatttttgatggatatgttttaaaagtaccagtggggtttggtcctccagtaggaatagaatatctctctagtgcctccc

SEQ ID NO: 111026 - DNA, 80 bp, synthetic construct
  source 1..80: mol_type = other DNA
ctcccctgggggtgtggagtatctttctcctacctcaccttcggaaggtgttgaatatctttcagcaacttcccctaaag

SEQ ID NO: 111027 - DNA, 80 bp, synthetic construct; identical to SEQ ID NO: 21766
  source 1..80: mol_type = other DNA

SEQ ID NO: 111028 - DNA, 80 bp, synthetic construct
  source 1..80: mol_type = other DNA
caagtaaatattgtgttagggaggtctcagattctgctgcctcagtggtatgtgcctcatctaatttaggaatattttga

SEQ ID NO: 111029 - DNA, 80 bp, synthetic construct
  source 1..80: mol_type = other DNA
ttcttctccagaggcatgaatgtttgtacttatttgttcacctggattctgttgttcttcagtcatcaagagtgggaagc

SEQ ID NO: 111030 - DNA, 80 bp, synthetic construct
  source 1..80: mol_type = other DNA
ccctaaaggcttttcctcacttgctgcttttttcaaatgtgagatggaacttctgcctccattttctagaggacaacttt

SEQ ID NO: 111031 - DNA, 80 bp, synthetic construct
  source 1..80: mol_type = other DNA
ggaattttcatcaatactacttttctccaccatagttctatttgaaagctcttgactggaagaaatttcttgactggcaa

SEQ ID NO: 111032 - DNA, 80 bp, synthetic construct; identical to SEQ ID NO: 21767
  source 1..80: mol_type = other DNA

SEQ ID NO: 111033 - DNA, 80 bp, synthetic construct
  source 1..80: mol_type = other DNA
gttgttccctttcttgtgcgtcaaattctttatgagtttgagaggaaagcagctttaaatttattgcaatgttagatgaa

SEQ ID NO: 111034 - DNA, 80 bp, synthetic construct
  source 1..80: mol_type = other DNA
ctttttctacatgtaatttttcaaattcgataattctatgcttcacctttttccccgggtagtgtatctcttcaccaagg

SEQ ID NO: 111035 - DNA, 80 bp, synthetic construct
  source 1..80: mol_type = other DNA
tagtgacatcactgaaatcatcaacaaatggataaacagtaccctctgcttggtgcagctttgatttttcacttacatgt

SEQ ID NO: 111036 - DNA, 80 bp, synthetic construct; identical to SEQ ID NO: 21768
  source 1..80: mol_type = other DNA

SEQ ID NO: 111037 - DNA, 80 bp, synthetic construct
  source 1..80: mol_type = other DNA
actattttctctataagtgacaggctccactgttagatctgaaacactttcaactgcccctgaattgttttcagcaacac

SEQ ID NO: 111038 - DNA, 80 bp, synthetic construct
  source 1..80: mol_type = other DNA
aatgatggaatccccttctctacacctggcatgctttggcatttcttgtaacatttttggtggttcattagtaatatcag

SEQ ID NO: 111039 - DNA, 80 bp, synthetic construct; identical to SEQ ID NO: 21769
  source 1..80: mol_type = other DNA

SEQ ID NO: 111040 - DNA, 80 bp, synthetic construct
  source 1..80: mol_type = other DNA
gcatactggttgtttttactgttccatattggttaaatagcacacaagtaatagaaccttcattctgatgatgaacagat

SEQ ID NO: 111041 - DNA, 80 bp, synthetic construct
  source 1..80: mol_type = other DNA
caatttcttgaagaaatgaaggtgggcaacgttgtgggcgttttcgaaaagaattttcaaaaaatctcatgttttcttcc

SEQ ID NO: 111042 - DNA, 80 bp, synthetic construct
  source 1..80: mol_type = other DNA
cattttcaggagtctcatatacttcctccttctcacatacattagtgatatatgtggatgactctccaattgtagtattg

SEQ ID NO: 111043 - DNA, 80 bp, synthetic construct
  source 1..80: mol_type = other DNA
tgggaagttcctcagattctatattttgatccatttgattagaaagggcatgtggattttgcacaatactctcagctgaa

SEQ ID NO: 111044 - DNA, 80 bp, synthetic construct; identical to SEQ ID NO: 21770
  source 1..80: mol_type = other DNA

SEQ ID NO: 111045 - DNA, 80 bp, synthetic construct
  source 1..80: mol_type = other DNA
ttgttaaagggagagccagtaaacctcaggtcaacctttatcctatcttctcccctttcaactaaagcctccacattttc

SEQ ID NO: 111046 - DNA, 80 bp, synthetic construct
  source 1..80: mol_type = other DNA
acttccagaatctctgtcttggacccttttaatctctaagctggaagagtgatggtgtaaatcactctcagcttttataa

SEQ ID NO: 111047 - DNA, 80 bp, synthetic construct; identical to SEQ ID NO: 21771
  source 1..80: mol_type = other DNA

SEQ ID NO: 111048 - DNA, 80 bp, synthetic construct
  source 1..80: mol_type = other DNA
caaatccatagaaaaattcactcaccatatttgttcgaataaacgcaacaccatgctctgtttaaaagattctgacacga

SEQ ID NO: 111049 - DNA, 80 bp, synthetic construct
  source 1..80: mol_type = other DNA
tcttttgatggctaagtggaaaatcttacctgacttgcagagagtggaataaacgccctttctgattcttttgattgtag

SEQ ID NO: 111050 - DNA, 80 bp, synthetic construct
  source 1..80: mol_type = other DNA
ataaggcagctatctgcaagccagtgtaagagacatatcaatgttaaaatgatatatgtgaatgaagtgtaaaccagatg

SEQ ID NO: 111051 - DNA, 80 bp, synthetic construct; identical to SEQ ID NO: 21772
  source 1..80: mol_type = other DNA

SEQ ID NO: 111052 - DNA, 80 bp, synthetic construct
  source 1..80: mol_type = other DNA
atcctattaatcctttagaatttctacttaaatctcacatccattataacaatacctttcatttccatctcaatctcttg

SEQ ID NO: 111053 - DNA, 80 bp, synthetic construct
  source 1..80: mol_type = other DNA
ccaaaaagtccatgccaaacaaactattgagctgataaaacacatgacaatgttgacagaaagatttaaaacatttttat

SEQ ID NO: 111054 - DNA, 80 bp, synthetic construct
  source 1..80: mol_type = other DNA
gcattttctaaattgctactttagcagagggctattctcagtttttcctgctagtaaacactcctttgatttgaatcacc

SEQ ID NO: 111055 - DNA, 80 bp, synthetic construct; identical to SEQ ID NO: 21773
  source 1..80: mol_type = other DNA

SEQ ID NO: 111056 - DNA, 80 bp, synthetic construct
  source 1..80: mol_type = other DNA
gggaaaggcataaattagctgtgtttgtaagaatgaaaaacatgctgaatgtggagaagatggaatgtcattaggatgag

SEQ ID NO: 111057 - DNA, 80 bp, synthetic construct
  source 1..80: mol_type = other DNA
agacttccaggggtttgacattcctacttgatcttggtggataactctgtagcctatatgaacttattaagccaaaataa

SEQ ID NO: 111058 - DNA, 80 bp, synthetic construct
  source 1..80: mol_type = other DNA
ataatattatcaattggaactgaatgaactggagatcctagggcaaaagagccgagttcaaatcaattctgggaatatga

SEQ ID NO: 111059 - DNA, 80 bp, synthetic construct; identical to SEQ ID NO: 21774
  source 1..80: mol_type = other DNA

SEQ ID NO: 111060 - DNA, 80 bp, synthetic construct
  source 1..80: mol_type = other DNA
taggtgttgcggatacattatatgaatcaataaactgtattctctgtactgggtaggaagaaaggccactgtttcaaaat

SEQ ID NO: 111061 - DNA, 80 bp, synthetic construct
  source 1..80: mol_type = other DNA
agtgaagctgttttgactacgggcacacaacacaggcttatggcacctgaaaaatatttttctcatttcattaatatcca

SEQ ID NO: 111062 - DNA, 80 bp, synthetic construct
  source 1..80: mol_type = other DNA
agcagcatcatttatggagaaatatctagagacttctaattttggtccagagagagctttgttattttcagtgcccaatt

SEQ ID NO: 111063 - DNA, 80 bp, synthetic construct
  source 1..80: mol_type = other DNA
aacatccaacatgcctggctaatttttgtatttttagtagagatggggtttcaccatattagccaggctggtctcaaact

SEQ ID NO: 111064 - DNA, 80 bp, synthetic construct; identical to SEQ ID NO: 21775
  source 1..80: mol_type = other DNA

SEQ ID NO: 111065 - DNA, 80 bp, synthetic construct
  source 1..80: mol_type = other DNA
ctagactggtaagttaaattttcaggataatcatggccaatgacttggctgactttcagaagtcacttatgaatagggtg

SEQ ID NO: 111066 - DNA, 80 bp, synthetic construct
  source 1..80: mol_type = other DNA
ttgtgtacaatgcagctgtatagtccttggtctaccagctgaacattacatatggtaagaaactgaatatttccattttg

SEQ ID NO: 111067 - DNA, 80 bp, synthetic construct; identical to SEQ ID NO: 21776
  source 1..80: mol_type = other DNA

SEQ ID NO: 111068 - DNA, 80 bp, synthetic construct
  source 1..80: mol_type = other DNA
gtggactctcttacatctttcccagaactttgcctatctagggcttgcactgtataatcaagtgacaagaaaaagaaaag

SEQ ID NO: 111069 - DNA, 80 bp, synthetic construct
  source 1..80: mol_type = other DNA
agtgctgagtggttgatgaagactcatgcagatgccatgcagtatctggttccttctttctgttgtcatttcagctatcc

SEQ ID NO: 111070 - DNA, 80 bp, synthetic construct
  source 1..80: mol_type = other DNA
aatcagcaaatagatcatttaatgatgcaatgatacaatattgcttagaagagtaaagaagccaagcaaaggtggtgcct

SEQ ID NO: 111071 - DNA, 80 bp, synthetic construct; identical to SEQ ID NO: 21777
  source 1..80: mol_type = other DNA

SEQ ID NO: 111072 - DNA, 80 bp, synthetic construct
  source 1..80: mol_type = other DNA
ctcctcaaaatggaaaactacatcttttgttggtagaattagctgctggttatgaaaccattggatttctggcttgggaa

SEQ ID NO: 111073 - DNA, 80 bp, synthetic construct
  source 1..80: mol_type = other DNA
gctaaatcctgaaaagaagcataccaatttttaatgtcttaccttgcactgaaaccagaactcatttggagttgtctaca

SEQ ID NO: 111074 - DNA, 80 bp, synthetic construct
  source 1..80: mol_type = other DNA
gaaggcaatagtggagtacccaacagggttttggatattcttttctttcttcctcttgttgtaaagtcaactttttaatt

SEQ ID NO: 111075 - DNA, 80 bp, synthetic construct
  source 1..80: mol_type = other DNA
ctatccttgtttgaatcaaattccccatgttactgaggaagtgtttctgattacaatttaagagccccaactaacagaaa

SEQ ID NO: 111076 - DNA, 80 bp, synthetic construct; identical to SEQ ID NO: 21778
  source 1..80: mol_type = other DNA

SEQ ID NO: 111077 - DNA, 80 bp, synthetic construct
  source 1..80: mol_type = other DNA
tacaaattgttacagagaaaaagcggggccaaatgaaacgtgatggtctatgattcacaatgaaaagtggtaaaggagag

SEQ ID NO: 111078 - DNA, 80 bp, synthetic construct
  source 1..80: mol_type = other DNA
atttaaatggggttctgaaagttgttttactttaccttccagactcaggttggctgtgcttgatacttggcctacagcat

SEQ ID NO: 111079 - DNA, 80 bp, synthetic construct
  source 1..80: mol_type = other DNA
tgctgtaccacgacacttttagatctgcgacacaaaagaaaagagatacttcaaccacaaaaatgagtggatttttacaa

SEQ ID NO: 111080 - DNA, 80 bp, synthetic construct
  source 1..80: mol_type = other DNA
aaggttgaactggttgtaatgtttaaaatgatagaacttcagttacattctctttagacatttgcatgtcatgcagtgga

SEQ ID NO: 111081 - DNA, 80 bp, synthetic construct; identical to SEQ ID NO: 21779
  source 1..80: mol_type = other DNA

SEQ ID NO: 111082 - DNA, 80 bp, synthetic construct
  source 1..80: mol_type = other DNA
ttattatggtatttgagcatcttagatacatttgactcttttcagagtggcagttataagacattataataaagctagct

SEQ ID NO: 111083 - DNA, 80 bp, synthetic construct
  source 1..80: mol_type = other DNA
agcacagtcactataccacttcttggtctcaaaaccatccaagatgatcttctaatagtccaatcatctagcatttgtct

SEQ ID NO: 111084 - DNA, 80 bp, synthetic construct
  source 1..80: mol_type = other DNA
cacctgtaatcccagcactttgggaggctgaggcgggcagatcacgaggtcaggagttcgagaacagcctgacgaacgtg

SEQ ID NO: 111085 - DNA, 80 bp, synthetic construct; identical to SEQ ID NO: 21780
  source 1..80: mol_type = other DNA

SEQ ID NO: 111086 - DNA, 80 bp, synthetic construct
  source 1..80: mol_type = other DNA
acatcacagatggaagcaacgttgtcttcaataacacgccaaaagacagtgccatgtgatataacatgaaacaccacccc

SEQ ID NO: 111087 - DNA, 80 bp, synthetic construct
  source 1..80: mol_type = other DNA
cactggacatgaactgcacacaataagtgagttaacaggtaaaacttttcttggtagtggacttggtgcttgtggctgtg

SEQ ID NO: 111088 - DNA, 80 bp, synthetic construct
  source 1..80: mol_type = other DNA
tcctgactgccagtcttgcctcccacatctgtccatcccttctttccctatcacagtatcacttctaaaaagtaaacctg

SEQ ID NO: 111089 - DNA, 80 bp, synthetic construct; identical to SEQ ID NO: 21781
  source 1..80: mol_type = other DNA

SEQ ID NO: 111090 - DNA, 80 bp, synthetic construct
  source 1..80: mol_type = other DNA
ccttaaaggcaagagcaagatctgcaccccagcacctagggtaatatctcaatagcagggaaacaataaatggtagaatt

SEQ ID NO: 111091 - DNA, 80 bp, synthetic construct
  source 1..80: mol_type = other DNA
attctgcttttccaaattactcctctaccagtaggtggcactggagaccttcaataggtaacattttcgctgttagaaac

SEQ ID NO: 111092 - DNA, 80 bp, synthetic construct; identical to SEQ ID NO: 21782
  source 1..80: mol_type = other DNA

SEQ ID NO: 111093 - DNA, 80 bp, synthetic construct
  source 1..80: mol_type = other DNA
tggttatgcagaaaagatagtgaaatttttctctttctaccccaattggtgtcttgtagagtgcttcaggtgtatttcta

SEQ ID NO: 111094 - DNA, 80 bp, synthetic construct
  source 1..80: mol_type = other DNA
taatatttagcatttcttgaacactatccctcaaatatacagtctatggtatttgtccatactggccatacaatactaaa

SEQ ID NO: 111095 - DNA, 80 bp, synthetic construct
  source 1..80: mol_type = other DNA
cattcctgaggaggaaataattgggtcagaagaccaactgaagtactaacctgttgagaaaaataaatcttgacaaggta

SEQ ID NO: 111096 - DNA, 80 bp, synthetic construct; identical to SEQ ID NO: 21783
  source 1..80: mol_type = other DNA

SEQ ID NO: 111097 - DNA, 80 bp, synthetic construct
  source 1..80: mol_type = other DNA
cagtcaacaattacttatggagtatctactatgtatcaggtgatattctggggcaaccatccactcttgttttcatagag

SEQ ID NO: 111098 - DNA, 80 bp, synthetic construct
  source 1..80: mol_type = other DNA
gattcaaattcagcatctttgacaatgaagccccgacttttgaccactataggatattgtcttccaaaggatacctttca

SEQ ID NO: 111099 - DNA, 80 bp, synthetic construct
  source 1..80: mol_type = other DNA
aaattaaagtgcagctacaatcataaagggaacatgaccttttttaatattagtgaaaaacactaatttttttattgtga

SEQ ID NO: 111100 - DNA, 80 bp, synthetic construct; identical to SEQ ID NO: 21784
  source 1..80: mol_type = other DNA

SEQ ID NO: 111101 - DNA, 80 bp, synthetic construct
  source 1..80: mol_type = other DNA
gacctcacagaagggagcatgtaggtttatcttaatttatttcactgcagagtgctttcaaagttgggtagcaatctact

SEQ ID NO: 111102 - DNA, 80 bp, synthetic construct
  source 1..80: mol_type = other DNA
tagactgccgcatcctctgggaaggcttcaattagcaaaagcgtgtattcttgcccatcatgaagaaatttgcacttgaa

SEQ ID NO: 111103 - DNA, 80 bp, synthetic construct; identical to SEQ ID NO: 21785
  source 1..80: mol_type = other DNA

SEQ ID NO: 111104 - DNA, 80 bp, synthetic construct
  source 1..80: mol_type = other DNA
aaagatatttttgatatttggggggcatgctgagagtgccgagttaacctgattatcccagtttctgtttgtggtggggg

SEQ ID NO: 111105 - DNA, 80 bp, synthetic construct
  source 1..80: mol_type = other DNA
agtgccagtaaaatgcaatcagtaagtattgaatgaatgactgaattaacactatttcagatctagttaaatgccattag

SEQ ID NO: 111106 - DNA, 80 bp, synthetic construct
  source 1..80: mol_type = other DNA
ttctgtgcctcagtttctccactactaatacagagataataagaactggatgccatgaccatttggtcttctaggaacct

SEQ ID NO: 111107 - DNA, 80 bp, synthetic construct; identical to SEQ ID NO: 21786
  source 1..80: mol_type = other DNA

SEQ ID NO: 111108 - DNA, 80 bp, synthetic construct
  source 1..80: mol_type = other DNA
agggtctcaaagaggacttttgagttctcccaggcactccatatcagaggctggaaacacccctttcacttggtagtgct

SEQ ID NO: 111109 - DNA, 80 bp, synthetic construct
  source 1..80: mol_type = other DNA
acttctcaataggtcttttaacagctgccctcccttttccatagatataatgtgaaaaaaaatgtagctggaaccacatg

SEQ ID NO: 111110 - DNA, 80 bp, synthetic construct
  source 1..80: mol_type = other DNA
tgtattctcctgcatcgctctgtctggtctcagagataaacattcggtggattcttctttccactacatatttgtgtcgt

SEQ ID NO: 111111 - DNA, 80 bp, synthetic construct
  source 1..80: mol_type = other DNA
tttcctcccagttaatcaatttctaaaactggtcaatgaatggcatgtgaaaccaatatattataatgtaataagttggc

SEQ ID NO: 111112 - DNA, 80 bp, synthetic construct; identical to SEQ ID NO: 21787
  source 1..80: mol_type = other DNA

SEQ ID NO: 111113 - DNA, 80 bp, synthetic construct
  source 1..80: mol_type = other DNA
atggaagacatctccaggttatctgagtcctcattgaagcctttttcattatagtccacagtctgtaaagcctggttttc

SEQ ID NO: 111114 - DNA, 80 bp, synthetic construct
  source 1..80: mol_type = other DNA
ttggacagggctttctcttagacttcacagaaagtatttctagccactaagttccttgacacttgcctctccacagatag

SEQ ID NO: 111115 - DNA, 80 bp, synthetic construct
  source 1..80: mol_type = other DNA
tagacagtgaaatttctacagctgctttaattaacgtatttagacagctgctagggacacccttattccctgagtggaaa

SEQ ID NO: 111116 - DNA, 80 bp, synthetic construct; identical to SEQ ID NO: 21788
  source 1..80: mol_type = other DNA

SEQ ID NO: 111117 - DNA, 80 bp, synthetic construct
  source 1..80: mol_type = other DNA
tttaccgtatggtgattcagaggaaactgggaattactggaatgtagcaagacaaaacaactgacctgtctgtgatctgc

SEQ ID NO: 111118 - DNA, 80 bp, synthetic construct
  source 1..80: mol_type = other DNA
cagtaccttaatgtccttaatgtgtttcctaaattctatatgacgagctggaaaatagcatgtagaaaaattaacatttt

SEQ ID NO: 111119 - DNA, 80 bp, synthetic construct; identical to SEQ ID NO: 21789
  source 1..80: mol_type = other DNA

SEQ ID NO: 111120 - DNA, 80 bp, synthetic construct
  source 1..80: mol_type = other DNA
tgtatgacattttttctatggatctaatatgtatgaaaccataccttccacataaagtgtggctgttgatgttgcttttc

SEQ ID NO: 111121 - DNA, 80 bp, synthetic construct
  source 1..80: mol_type = other DNA
ctcaaaagtaatagtgtctttttcttcagcgttgatgtctttcagcatggaagtaatcatgattgctgcaaaggagaaaa

SEQ ID NO: 111122 - DNA, 80 bp, synthetic construct
  source 1..80: mol_type = other DNA
agaggaacagaaagatcaagtgatagacactgaggcatctttccaggtagcctttcaatgctactctaactggaacattt

SEQ ID NO: 111123 - DNA, 80 bp, synthetic construct
  source 1..80: mol_type = other DNA
gcccaagcgatcttcccacctcagcctcctgagtagctgggactacaagtgtgtgccaccatgcccagctaatttttttt

SEQ ID NO: 111124 - DNA, 80 bp, synthetic construct; identical to SEQ ID NO: 21790
  source 1..80: mol_type = other DNA

SEQ ID NO: 111125 - DNA, 80 bp, synthetic construct
  source 1..80: mol_type = other DNA
gctggtgttcatgatgatcagctgatggagttttccctgcacaactatcttgaacttttcactcatctcaatttccacac

SEQ ID NO: 111126 - DNA, 80 bp, synthetic construct
  source 1..80: mol_type = other DNA
agatgaaaccaaacaaatagatacatggggttcattaaggaaagggctgtagggggctgcctgatacttactctccacaa

SEQ ID NO: 111127 - DNA, 80 bp, synthetic construct; identical to SEQ ID NO: 21791
  source 1..80: mol_type = other DNA

SEQ ID NO: 111128 - DNA, 80 bp, synthetic construct
  source 1..80: mol_type = other DNA
actcatccacgatggcacagtttttaatcctcagagagtaaattgttcctttgacagagatagcatacttttcattggat

SEQ ID NO: 111129 - DNA, 80 bp, synthetic construct
  source 1..80: mol_type = other DNA
tagatgacatcatcaaggaaaagaagtcctgaacaagatcattgcttactcaccctgcaaaagaatggctaccaaacatt

SEQ ID NO: 111130 - DNA, 80 bp, synthetic construct
  source 1..80: mol_type = other DNA
gggtgaaagacgaatggagaatcagtgtctgatttagctgtttcacagagctttaacctaagaaatggcttttttgcata

SEQ ID NO: 111131 - DNA, 80 bp, synthetic construct; identical to SEQ ID NO: 21792
  source 1..80: mol_type = other DNA

SEQ ID NO: 111132 - DNA, 80 bp, synthetic construct
  source 1..80: mol_type = other DNA
cacctttggaacaagagatgtacagtatgagtcctttaaacatattcacacaatgggaaaatctttgcagaagtaaatat

SEQ ID NO: 111133 - DNA, 80 bp, synthetic construct
  source 1..80: mol_type = other DNA
ctgttgaattaataggaaattcttagaacagtataccaccaggatagtctctaacccaattccttcttcttcaaaagcat

SEQ ID NO: 111134 - DNA, 80 bp, synthetic construct
  source 1..80: mol_type = other DNA
aaaatcactgtgttggcaaatgtcgcccattctatgaagtttcaccccattgcctccactcttatcatccattagcagaa

SEQ ID NO: 111135 - DNA, 80 bp, synthetic construct; identical to SEQ ID NO: 21793
  source 1..80: mol_type = other DNA

SEQ ID NO: 111136 - DNA, 80 bp, synthetic construct
  source 1..80: mol_type = other DNA
tactagatgtaatggacaacacgatctgaatgtaacatctcaactcctcaaaatttaaactgtaatgaaccaaacaaatt

SEQ ID NO: 111137 - DNA, 80 bp, synthetic construct
  source 1..80: mol_type = other DNA
aaagtaggaagaaaataaaaggcacaaaggctaaagaagcaagaatggctaaaaaaggaaataattctttagagtaagga

SEQ ID NO: 111138 - DNA, 80 bp, synthetic construct
  source 1..80: mol_type = other DNA
gcacatataaagtgatcctggggttggatgaggaagagatcatatacaaatggagagattaaggaaggtttaatggagaa

SEQ ID NO: 111139 - DNA, 80 bp, synthetic construct; identical to SEQ ID NO: 21794
  source 1..80: mol_type = other DNA

SEQ ID NO: 111140 - DNA, 80 bp, synthetic construct
  source 1..80: mol_type = other DNA
aacaccacattttgagtttctgtacaggtaaggtcacgaagacctctgataattttaatttctggggaaaaaataaaata

SEQ ID NO: 111141 - DNA, 80 bp, synthetic construct
  source 1..80: mol_type = other DNA
ctagtcgctgtttagtacctttcacaatggcctgtacacggtcatcaggcttgatttgttcatcatttaagtaccactta

SEQ ID NO: 111142 - DNA, 80 bp, synthetic construct
  source 1..80: mol_type = other DNA
tttatgttgcttaatagtgtaaacataaaattttataattaggactcactatagacagagacacgcccactggtggagag

SEQ ID NO: 111143 - DNA, 80 bp, synthetic construct
  source 1..80: mol_type = other DNA
gagactttaacttcaagctgaacaatgtcaccctcacagactttttggtcactaagtccttgtaggatagcaatggggcg

SEQ ID NO: 111144 - DNA, 80 bp, synthetic construct; identical to SEQ ID NO: 21795
  source 1..80: mol_type = other DNA

SEQ ID NO: 111145 - DNA, 80 bp, synthetic construct
  source 1..80: mol_type = other DNA
tggagaggtatgcatctagacttaggatagagatgatgtcttgtatgtcttttatctcccccatactatcaggtgtattc

SEQ ID NO: 111146 - DNA, 80 bp, synthetic construct
  source 1..80: mol_type = other DNA
aaattgttaacattcttaattacgaacataaatttatgattctggctatgaaacttatagtcaatttccaaataattgtt

SEQ ID NO: 111147 - DNA, 80 bp, synthetic construct; identical to SEQ ID NO: 21796
  source 1..80: mol_type = other DNA

SEQ ID NO: 111148 - DNA, 80 bp, synthetic construct
  source 1..80: mol_type = other DNA
gatcaattgcttggctacaagaaaaaggtgggggaaaaaggggagagcacattatattaaattaaattctcaacctgagg

SEQ ID NO: 111149 - DNA, 80 bp, synthetic construct
  source 1..80: mol_type = other DNA
ctccagctatgttgatggcttttaccatgatgctggcagagtcctcagcagtcacatctcttatgaccaattcacaaaca

SEQ ID NO: 111150 - DNA, 80 bp, synthetic construct
  source 1..80: mol_type = other DNA
ttggagcctccatactaggacttagttcaatcttgtcaggtttaaaagttggaatcgtgattttgccttcttcggcaaga

SEQ ID NO: 111151 - DNA, 80 bp, synthetic construct; identical to SEQ ID NO: 21797
  source 1..80: mol_type = other DNA

SEQ ID NO: 111152 - DNA, 80 bp, synthetic construct
  source 1..80: mol_type = other DNA
ctctgttgaatctcaagcttcactttatgctctatcacaccttcaggattttccgcggtgaccttcacttcacctgtgtc

SEQ ID NO: 111153 - DNA, 80 bp, synthetic construct
  source 1..80: mol_type = other DNA
actctaactggctctgggtacaagacaatgtctggcttttgcttttctttctgatctgttgttacacctgtaagtgcacc

SEQ ID NO: 111154 - DNA, 80 bp, synthetic construct
  source 1..80: mol_type = other DNA
tgttccatatttgttagtggctctgcaagtaatgataccactgtctctagaatatgcaacgccataatcaaggctgcagt

SEQ ID NO: 111155 - DNA, 80 bp, synthetic construct; identical to SEQ ID NO: 21798
  source 1..80: mol_type = other DNA

SEQ ID NO: 111156 - DNA, 80 bp, synthetic construct
  source 1..80: mol_type = other DNA
agaatcttggctgacagtggaatcgattttaagggcagcttctcccttggttccttcaattctataaaaagttgggggag

SEQ ID NO: 111157 - DNA, 80 bp, synthetic construct
  source 1..80: mol_type = other DNA
tctgactttcatttcaagtcgggaaccttcctttatattgacatttttcagtttttctacaaacatcggttttacctgat

SEQ ID NO: 111158 - DNA, 80 bp, synthetic construct
  source 1..80: mol_type = other DNA
ggcaaccacagtccattccccagaatcactgggtgtggcagggacaataattagtgattgagtaccatcttctttaatga

SEQ ID NO: 111159 - DNA, 80 bp, synthetic construct
  source 1..80: mol_type = other DNA
tgaaaccagaacgtctctggcataggtctaccaacaacctttaagtcaaatctggcagtttgcccttctaaacatttgaa

SEQ ID NO: 111160 - DNA, 80 bp, synthetic construct; identical to SEQ ID NO: 21799
  source 1..80: mol_type = other DNA

SEQ ID NO: 111161 - DNA, 80 bp, synthetic construct
  source 1..80: mol_type = other DNA
cattcagtatatccaggtacccaggctcaaaaatcttggaataatcctcaatactctcttttccttaccacttggattta

SEQ ID NO: 111162 - DNA, 80 bp, synthetic construct
  source 1..80: mol_type = other DNA
aggaaaacatagaaatgaatttggaaacaaaacaaagcaaaacaagactccatctacacattgcagccagactgacttgg

SEQ ID NO: 111163 - DNA, 80 bp, synthetic construct
  source 1..80: mol_type = other DNA
agagctattgtgatattagctatagcactaggaaaataaacagtatgttacactgatgaaaattctttgctcatcttaca

SEQ ID NO: 111164 - DNA, 80 bp, synthetic construct; identical to SEQ ID NO: 21800
  source 1..80: mol_type = other DNA

SEQ ID NO: 111165 - DNA, 80 bp, synthetic construct
  source 1..80: mol_type = other DNA
tggtatctttctccatgtttgatgcgcttgccatctttgtaccaagcaatctgcaaagaataccatgcatgtatgaataa

SEQ ID NO: 111166 - DNA, 80 bp, synthetic construct
  source 1..80: mol_type = other DNA
aatcaaatcctgattcaacagcttcagattcagaaatgtcaactgccatcttttcttctccatcttcttcaagaagttct

SEQ ID NO: 111167 - DNA, 80 bp, synthetic construct; identical to SEQ ID NO: 21801
  source 1..80: mol_type = other DNA

SEQ ID NO: 111168 - DNA, 80 bp, synthetic construct
  source 1..80: mol_type = other DNA
taaagtcacatttatggcctatatgtaatctctatttctaaactcacaggtgcaacataccatgaagattaaggaaactt

SEQ ID NO: 111169 - DNA, 80 bp, synthetic construct
  source 1..80: mol_type = other DNA
tttatactcacctgatcttctacataagttctgaccactacagtatctttggccattttcttcctaattaaggcttgttc

SEQ ID NO: 111170 - DNA, 80 bp, synthetic construct
  source 1..80: mol_type = other DNA
tcacttgtgtctgataaagcatttcttgctgggacttcatcagtaactcataatcagctaagagttaagaacatcagtta

SEQ ID NO: 111171 - DNA, 80 bp, synthetic construct; identical to SEQ ID NO: 21802
  source 1..80: mol_type = other DNA

SEQ ID NO: 111172 - DNA, 80 bp, synthetic construct
  source 1..80: mol_type = other DNA
gagtgtgagccagttcactgtaaatgtgaacagtctagcatgaaagctgttacatttgttttcaagttataaacattgaa

SEQ ID NO: 111173 - DNA, 80 bp, synthetic construct
  source 1..80: mol_type = other DNA
tgcctgggcctggaaggcaaccggatttagaatctctgcattttcagaggcatgatatgcctagaaacaaatacaacaaa

SEQ ID NO: 111174 - DNA, 80 bp, synthetic construct
  source 1..80: mol_type = other DNA
ctccttgtatttcagttcttatcatgcacatagaaactggagttgcacttaccttcttcaagcaaggaagcagatgcaga

SEQ ID NO: 111175 - DNA, 80 bp, synthetic construct; identical to SEQ ID NO: 21803
  source 1..80: mol_type = other DNA

SEQ ID NO: 111176 - DNA, 80 bp, synthetic construct
  source 1..80: mol_type = other DNA
cacttaaacaacaggtattttctctttgttcgttatttttctcattatttcattcagagatcaaatgaataattaaaaca

SEQ ID NO: 111177 - DNA, 80 bp, synthetic construct
  source 1..80: mol_type = other DNA
agcatagatttttgtgcataactagctttcttcttcattacatggctattcttctatcttttagtcacttagttattaca

SEQ ID NO: 111178 - DNA, 80 bp, synthetic construct
  source 1..80: mol_type = other DNA
atagctttatttcttaggaagactttgcacaaaaaaaatgtaaaaatacctcaaaacaaactaagaaggctccacaatga

SEQ ID NO: 111179 - DNA, 80 bp, synthetic construct; identical to SEQ ID NO: 21804
  source 1..80: mol_type = other DNA

SEQ ID NO: 111180 - DNA, 80 bp, synthetic construct
  source 1..80: mol_type = other DNA
tggaaagagaattcccctcatattagcttccgggttgcaatttgccaatactggtggggctgaaagtcaaaatggtacta

SEQ ID NO: 111181 - DNA, 80 bp, synthetic construct
  source 1..80: mol_type = other DNA
taaattgaccatataatctccccccaagttccaaaaagggacatcatttcaaggtgcacagaaaccatattgtggaaaag

SEQ ID NO: 111182 - DNA, 80 bp, synthetic construct
  source 1..80: mol_type = other DNA
acgagcaattccactctggaaggttatctggaagtcaatggaactttcgatttggtagtcttccctgtaccatgtcactg

SEQ ID NO: 111183 - DNA, 80 bp, synthetic construct; identical to SEQ ID NO: 21805
  source 1..80: mol_type = other DNA

SEQ ID NO: 111184 - DNA, 80 bp, synthetic construct
  source 1..80: mol_type = other DNA
gggatggattggtctttatgtctgcacagctcctgcaataatgccttctgcatattagaagctcattaaatcttttgaat

SEQ ID NO: 111185 - DNA, 80 bp, synthetic construct
  source 1..80: mol_type = other DNA
tgatttgaggagatatgaatagggtccagcattatcaacttctttactcaccgagaccaaagttggtggagtaacaggaa

SEQ ID NO: 111186 - DNA, 80 bp, synthetic construct
  source 1..80: mol_type = other DNA
aaatgatctctgacccatactatgctccataaaaatcaagtcttagtatggcaaaggagaaaggcaagactccactggct

SEQ ID NO: 111187 - DNA, 80 bp, synthetic construct; identical to SEQ ID NO: 21806
  source 1..80: mol_type = other DNA

SEQ ID NO: 111188 - DNA, 80 bp, synthetic construct
  source 1..80: mol_type = other DNA
ccatcctccgatggctagccctcttggactgagtctgagcctattttctataaggtctgttctttaatgttctcattagc

SEQ ID NO: 111189 - DNA, 80 bp, synthetic construct
  source 1..80: mol_type = other DNA
tcttctaaagcttagtcacgaattttcacttaaccattccgatgaatgccacttttgaaaataccacagtgggagattca

SEQ ID NO: 111190 - DNA, 80 bp, synthetic construct
  source 1..80: mol_type = other DNA
ggttatttgttttgtaatttgggactaaatcaaatataggcattatatgtaacttacagttctttgaaggcatagaaggt

SEQ ID NO: 111191 - DNA, 80 bp, synthetic construct; identical to SEQ ID NO: 21807
  source 1..80: mol_type = other DNA

SEQ ID NO: 111192 - DNA, 80 bp, synthetic construct
  source 1..80: mol_type = other DNA
gtccctgaaatgtgaactagagagaagcctgtgtggatttgtctctcctcagaggtataagataaccacttgtgactcta

SEQ ID NO: 111193 - DNA, 80 bp, synthetic construct
  source 1..80: mol_type = other DNA
atgttctgtcttaggaacagaaatttttgaaacagtaaagtgagggctagctgtgcgggggcgtttatccacatggacta

SEQ ID NO: 111194 - DNA, 80 bp, synthetic construct
  source 1..80: mol_type = other DNA
cttttgatcagtagttttgatatgagtctcagaaggagcctggattactctaggcttgactgctttagggacaacgtggg

SEQ ID NO: 111195 - DNA, 80 bp, synthetic construct; identical to SEQ ID NO: 21808
  source 1..80: mol_type = other DNA

SEQ ID NO: 111196 - DNA, 80 bp, synthetic construct
  source 1..80: mol_type = other DNA
tgtacagacatctatttagatatactctctgtacacctacttaattatactagacattaaatcacatatacacaacatag

SEQ ID NO: 111197 - DNA, 80 bp, synthetic construct
  source 1..80: mol_type = other DNA
tgcagtgacagtgatgatataagtgcactcaaataccgtcatcatcctgtccagaaaaatcagtgactacagagttatat

SEQ ID NO: 111198 - DNA, 80 bp, synthetic construct
  source 1..80: mol_type = other DNA
acacagatgacaaagagaaccccgtgcaaataaaaatattgtgattaaaatgaaagtgttatcatgtttggattcaagag

SEQ ID NO: 111199 - DNA, 80 bp, synthetic construct
  source 1..80: mol_type = other DNA
gtggcttagatattatgattctatgtgatacttggaaacagcatacctcaaaaatcacatagccatgttcattttaaaag

SEQ ID NO: 111200 - DNA, 80 bp, synthetic construct; identical to SEQ ID NO: 21809
  source 1..80: mol_type = other DNA

SEQ ID NO: 111201 - DNA, 80 bp, synthetic construct
  source 1..80: mol_type = other DNA
ttcatctgcctcgaaggactgcaaataccatcttcactttagattgcatcatctcagaaaaaaacataaaatacacatga

SEQ ID NO: 111202 - DNA, 80 bp, synthetic construct
  source 1..80: mol_type = other DNA
ccactatatctcatttgaaccttttagccagtctgctatgaagtagtcagcttaagtcttaattttattttaacaatgat

SEQ ID NO: 111203 - DNA, 80 bp, synthetic construct
  source 1..80: mol_type = other DNA
cagatttatatacacacacttattggtggactacaaatgagtatgctggtaaccgcttttatttcttagtggactttgat

SEQ ID NO: 111204 - DNA, 80 bp, synthetic construct
  source 1..80: mol_type = other DNA
ctgacttttcactactagaaatgctcactgttcaactggaggatggactgaatctaaccatctctattgttttattgatc

SEQ ID NO: 111205 - DNA, 80 bp, synthetic construct; identical to SEQ ID NO: 21810
  source 1..80: mol_type = other DNA

SEQ ID NO: 111206 - DNA, 80 bp, synthetic construct
  source 1..80: mol_type = other DNA
gttaatcactcatgaagtatgttgcatagtggaatttctgtcatttatgagacttctgaaaggctgatatgccattaaat

SEQ ID NO: 111207 - DNA, 80 bp, synthetic construct
  source 1..80: mol_type = other DNA
tagcaataaagaatacaattaggtaaatggctcatttggagtaaatgacagagtcatgggaaacagtttaattcatggat

SEQ ID NO: 111208 - DNA, 80 bp, synthetic construct
  source 1..80: mol_type = other DNA
cagcatgcattataattttttcagcttatcttctcctctgatatttacaggagggaaaaaagataaagtttcatacaaag

SEQ ID NO: 111209 - DNA, 80 bp, synthetic construct
  source 1..80: mol_type = other DNA
agcctgcatgcaattttaatcaacttctggaagattcccagatgttaataaaatgttgacaataatggtgaagagataag

SEQ ID NO: 111210 - DNA, 80 bp, synthetic construct; identical to SEQ ID NO: 21811
  source 1..80: mol_type = other DNA

SEQ ID NO: 111211 - DNA, 80 bp, synthetic construct
  source 1..80: mol_type = other DNA
catagtatgacccttcccccttcctcatggggatgcaagatggttattcagggttaaatacacaagagaaataaactttc

SEQ ID NO: 111212 - DNA, 80 bp, synthetic construct
  source 1..80: mol_type = other DNA
ttacagatggatgaaaatcaaatgtgcagataaaattaatgataatcagtctcatatttaccattttgtttttagttagg

SEQ ID NO: 111213 - DNA, 80 bp, synthetic construct; identical to SEQ ID NO: 21812
  source 1..80: mol_type = other DNA

SEQ ID NO: 111214 - DNA, 80 bp, synthetic construct
  source 1..80: mol_type = other DNA
ccatactgtttcactggcaaaaatatcaaaacaataagtccagtttaaaagaaaaaaatgtgattagcaataaaagacta

SEQ ID NO: 111215 - DNA, 80 bp, synthetic construct
  source 1..80: mol_type = other DNA
agtaacaagccaaagaaagtctgaaagttaggaatgaattgacagtgaaaggtagctgtgtgggaaaagaaattttctat

SEQ ID NO: 111216 - DNA, 80 bp, synthetic construct
  source 1..80: mol_type = other DNA
ttttcataacttaggtgcatttgatcttgttgtgtggtagtttcttcttgagctcccgggactgtttctagttttgtgga

SEQ ID NO: 111217 - DNA, 80 bp, synthetic construct; identical to SEQ ID NO: 21813
  source 1..80: mol_type = other DNA

SEQ ID NO: 111218 - DNA, 80 bp, synthetic construct
  source 1..80: mol_type = other DNA
gggatttctatgcctttgattatcctaagtagggttcttgctgctttcaaaatgtctcactcacagtaaggagagggaaa

SEQ ID NO: 111219 - DNA, 80 bp, synthetic construct
  source 1..80: mol_type = other DNA
tctttgacatggaagaattcaagataaatgcctctctcctgacacttaaaggtttgatttcacatacgggagagatgtgg

SEQ ID NO: 111220 - DNA, 80 bp, synthetic construct
  source 1..80: mol_type = other DNA
tttctccgatgtctggcatatcctcactttcccttgctatttattcggggtgtttatggctgatgtatgtgtatatgtgt

SEQ ID NO: 111221 - DNA, 80 bp, synthetic construct; identical to SEQ ID NO: 21814
  source 1..80: mol_type = other DNA

SEQ ID NO: 111222 - DNA, 80 bp, synthetic construct
  source 1..80: mol_type = other DNA
gggttttgactataagctacctgcagctggctgtaatgtgatattgtcaacaaactacaaaatatttagaaaatcagact

SEQ ID NO: 111223 - DNA, 80 bp, synthetic construct
  source 1..80: mol_type = other DNA
ttcctgatgcccaatgaaataatatggtgtttattaaatataacaacataggaatttgaagatgtaaaatcccttttctg

SEQ ID NO: 111224 - DNA, 80 bp, synthetic construct
  source 1..80: mol_type = other DNA
caatgtttacaaatagatctatggcaatattattctgtactaattctgtcatctaaaggtaatcttagaatatatatcag

SEQ ID NO: 111225 - DNA, 80 bp, synthetic construct; identical to SEQ ID NO: 21815
  source 1..80: mol_type = other DNA

SEQ ID NO: 111226 - DNA, 80 bp, synthetic construct
  source 1..80: mol_type = other DNA
ccatgctgtccattccacttcaaactcatgtgcaaatgtcttccgaaggagccaggaagcagttgctaagatttctaaag

SEQ ID NO: 111227 - DNA, 80 bp, synthetic construct
  source 1..80: mol_type = other DNA
acagagttctttttcatactcacaaggggagcattcagggacactaccaaactttggtatccagtacccagaaatttaca

SEQ ID NO: 111228 - DNA, 80 bp, synthetic construct
  source 1..80: mol_type = other DNA
tcttgctttgtggtaattacttctttggttcttgattttaattcttgttccttggctttatcggcggccactactacctt

SEQ ID NO: 111229 - DNA, 80 bp, synthetic construct
  source 1..80: mol_type = other DNA
gcacacctgtaatcccagctactcacgagactgaggcacaagaatcacttaaacccaggaggcggaggctgcagtgagcg

SEQ ID NO: 111230 - DNA, 80 bp, synthetic construct; identical to SEQ ID NO: 21816
  source 1..80: mol_type = other DNA

SEQ ID NO: 111231 - DNA, 80 bp, synthetic construct
  source 1..80: mol_type = other DNA
ttttgcctgctcatatagcccaggtatttctggcctactctgctcttgtgatactcacattgtcaacacctttgacatct

SEQ ID NO: 111232 - DNA, 80 bp, synthetic construct
  source 1..80: mol_type = other DNA
tcgcacgtacctgttcttgagcaggttggatgtgcacagcagtcgtggttgtcctctgagcagtctgctctacagcgctg

SEQ ID NO: 111233 - DNA, 80 bp, synthetic construct
  source 1..80: mol_type = other DNA
tgacatgcccagtagaaaataaaaaagcatactggaaaactgagccacctagagcaaaatacactcatacataagcattt

SEQ ID NO: 111234 - DNA, 80 bp, synthetic construct; identical to SEQ ID NO: 21817
  source 1..80: mol_type = other DNA

SEQ ID NO: 111235 - DNA, 80 bp, synthetic construct
  source 1..80: mol_type = other DNA
atctcccttcccatctctcttctgtcctgatctgagtagaggttgtcagcgttgtctctctcatctcagcctcagatgag

SEQ ID NO: 111236 - DNA, 80 bp, synthetic construct
  source 1..80: mol_type = other DNA
agaggtcaagaatgtcaaagcaaggaggggtaactggatgtgaatcatgagatgaaaagctggaagtgctttaaggcaga

SEQ ID NO: 111237 - DNA, 80 bp, synthetic construct
  source 1..80: mol_type = other DNA
cctattcttatctgctgtaaccctgtaagagaatcagctttaattccaaataagctggagattttgtgccttgcaccttc

SEQ ID NO: 111238 - DNA, 80 bp, synthetic construct; identical to SEQ ID NO: 21818
  source 1..80: mol_type = other DNA

SEQ ID NO: 111239 - DNA, 80 bp, synthetic construct
  source 1..80: mol_type = other DNA
tgctttagccgaagtgtttgtggacagctacttttaatttcctccatatttgtttacactcgccccccttgtattgcact

SEQ ID NO: 111240 - DNA, 80 bp, synthetic construct
  source 1..80: mol_type = other DNA
aagaatttgggtgctaaatcccagcactgatggccaaaaaagactatttctgatctatagcaataattctggggattggc

SEQ ID NO: 111241 - DNA, 80 bp, synthetic construct
  source 1..80: mol_type = other DNA
ttagcttacactgatcatacatgaaatgattattctaattaagctcaaggtacagttgatattttctctaacttacagag

SEQ ID NO: 111242 - DNA, 80 bp, synthetic construct; identical to SEQ ID NO: 21819
  source 1..80: mol_type = other DNA

SEQ ID NO: 111243 - DNA, 80 bp, synthetic construct
  source 1..80: mol_type = other DNA
gtgcttatttctgtacttacaacaaaaaataatcacctggtcacagcgagatacaatgcaccttattcaatgaaatatgt

SEQ ID NO: 111244 - DNA, 80 bp, synthetic construct
  source 1..80: mol_type = other DNA
aaattttggggcaatttggatggttattaatgaactttcaaaactgctaagatggtcaaaatgctccatgggatcaggga

SEQ ID NO: 111245 - DNA, 80 bp, synthetic construct
  source 1..80: mol_type = other DNA
cctgagactgaacatttttttttattcgactgctagacatgttttttaaagtaagctttttgttcaaggtttcatgttag

SEQ ID NO: 111246 - DNA, 80 bp, synthetic construct; identical to SEQ ID NO: 21820
  source 1..80: mol_type = other DNA

SEQ ID NO: 111247 - DNA, 80 bp, synthetic construct
  source 1..80: mol_type = other DNA
gtaccttgaggaggagaaaggtcttaaaattttttcacaagtgctgtttggtttagaaatgactttttgcttttgccata

SEQ ID NO: 111248 - DNA, 80 bp, synthetic construct
  source 1..80: mol_type = other DNA
gaaatttattctgtaaatagtgagaggcagaggtttatgtttgtttgcttccagatggatagctaattggaccagcattc

SEQ ID NO: 111249 - DNA, 80 bp, synthetic construct; identical to SEQ ID NO: 21821
  source 1..80: mol_type = other DNA

SEQ ID NO: 111250 - DNA, 80 bp, synthetic construct
  source 1..80: mol_type = other DNA
aactttcaaaactgttgtggacaatttacacttgattatataatttctgagccctgatcatgatacatgatcaccttcta

SEQ ID NO: 111251 - DNA, 80 bp, synthetic construct
  source 1..80: mol_type = other DNA
attgaagccccaaaatgcagcttgagatcattcttattgtgactctctttaatttacagatgacacaactgaaaccttaa

SEQ ID NO: 111252 - DNA, 80 bp, synthetic construct
  source 1..80: mol_type = other DNA
attgccctaaatcaaactgttaagtgatcaggctgatttgtccttagggctttgaactctaacttctgtgctcttctcct

SEQ ID NO: 111253 - DNA, 80 bp, synthetic construct; identical to SEQ ID NO: 21822
  source 1..80: mol_type = other DNA

SEQ ID NO: 111254 - DNA, 80 bp, synthetic construct
  source 1..80: mol_type = other DNA
gccacgcccacaccctatgcctataaaaacccctgagaccctagtaggcagacacacaagcggctggatgtccagaggaa

SEQ ID NO: 111255 - DNA, 80 bp, synthetic construct
  source 1..80: mol_type = other DNA
cgtttcaaaacctagttccaaaatgtgcaataatctgctctctctatggcagctttacctgaccggagatggggtcggtg

SEQ ID NO: 111256 - DNA, 80 bp, synthetic construct
  source 1..80: mol_type = other DNA
ggcaccatctatgaccatctcaactgttgcaattgatctggcatcaaagtgggcttcaatcttctgtaaaagattaaaac

SEQ ID NO: 111257 - DNA, 80 bp, synthetic construct; identical to SEQ ID NO: 21823
  source 1..80: mol_type = other DNA

SEQ ID NO: 111258 - DNA, 80 bp, synthetic construct
  source 1..80: mol_type = other DNA
gaaatgtagatcacttaattgaaaccctttccagtttataatgagattcataagcacagattgcttctattctgcgctcc

SEQ ID NO: 111259 - DNA, 80 bp, synthetic construct
  source 1..80: mol_type = other DNA
acgtaccttgaaccagtaattcagcagtcgaagtagctcttccaacgctattggtggcatttactgaataggtccctgag

SEQ ID NO: 111260 - DNA, 80 bp, synthetic construct
  source 1..80: mol_type = other DNA
attccagtcactctcacttggagtctcacttggcttccttgtctcacggtcatgctctgcagtcgttgaacgaagttggg

SEQ ID NO: 111261 - DNA, 80 bp, synthetic construct; identical to SEQ ID NO: 21824
  source 1..80: mol_type = other DNA

SEQ ID NO: 111262 - DNA, 80 bp, synthetic construct
  source 1..80: mol_type = other DNA
attaatatgtgaaagccatgttgcatattccagtaagttgcattaaaatgaattccagtggttgctacgatgggtgtacc

SEQ ID NO: 111263 - DNA, 80 bp, synthetic construct
  source 1..80: mol_type = other DNA
agtgagtggaattaactttgacatgattttgagtaataaacaacagcaggtgctgccaaccctgtgcattttccatttgt

SEQ ID NO: 111264 - DNA, 80 bp, synthetic construct
  source 1..80: mol_type = other DNA
gtaaaggcatgcaatattctgtatactaatgtctcactaggtagtaaaggatagagaaaaacaacagaggccactaagat

SEQ ID NO: 111265 - DNA, 80 bp, synthetic construct
  source 1..80: mol_type = other DNA
cacacttccctggagaatatgtcttattccttaaaggacttataaacaaggctccaagcttttctacttgctgagaaaca

SEQ ID NO: 111266 - DNA, 80 bp, synthetic construct; identical to SEQ ID NO: 21825
  source 1..80: mol_type = other DNA

SEQ ID NO: 111267 - DNA, 80 bp, synthetic construct
  source 1..80: mol_type = other DNA
ctttcagggaatatcgtccactgttggctttagtcacggcggggatcgtcagtttagcgcggccatcgctaaaggagatc

SEQ ID NO: 111268 - DNA, 80 bp, synthetic construct
  source 1..80: mol_type = other DNA
aatctgtaaaagctttccagcatggaatgccacttaatgatagggaaaaccctacagttgcatgatcagtgtgtaaacct

SEQ ID NO: 111269 - DNA, 80 bp, synthetic construct
  source 1..80: mol_type = other DNA
ctgcctagggctctatctgatgcaatttaatagacaacattaaaatcatgaaagggacttataaaaatgaagaaccaagg

SEQ ID NO: 111270 - DNA, 80 bp, synthetic construct; identical to SEQ ID NO: 21826
  source 1..80: mol_type = other DNA

SEQ ID NO: 111271 - DNA, 80 bp, synthetic construct
  source 1..80: mol_type = other DNA
cacttggcataaaggttgatgctctatctacttacgctggtaggtaaagataatctagagaaagtctattttgttgttta

SEQ ID NO: 111272 - DNA, 80 bp, synthetic construct
  source 1..80: mol_type = other DNA
caaattcccactgaagtcatatgtgttctgctcagttcagaagttactgagtgttaccagataaataggtaaattatttg

SEQ ID NO: 111273 - DNA, 80 bp, synthetic construct
  source 1..80: mol_type = other DNA
atagaaaaaaagagaaaaaaagaaattttattttatatctttattataagccataaaattttaaaaaagaagtgggcaat

SEQ ID NO: 111274 - DNA, 80 bp, synthetic construct; identical to SEQ ID NO: 21827
  source 1..80: mol_type = other DNA

SEQ ID NO: 111275 - DNA, 80 bp, synthetic construct
  source 1..80: mol_type = other DNA
ttaattactgaacagctctgcctctgaggaaaattagatgcactgttattttgcgtgtgaaccaactgaagttcaggtgt

SEQ ID NO: 111276 - DNA, 80 bp, synthetic construct
  source 1..80: mol_type = other DNA
ggctctgcagctgagcccaaatatagaatgactaaatttggtcctatttagttgctggattctaacggcaattttaatcc

SEQ ID NO: 111277 - DNA, 80 bp, synthetic construct
  source 1..80: mol_type = other DNA
actctgtgaatggtatacccttaaaatgacctttccatagtgttggactaattttccgaagtgaaagcagggcttaaact

SEQ ID NO: 111278 - DNA, 80 bp, synthetic construct; identical to SEQ ID NO: 21828
  source 1..80: mol_type = other DNA

SEQ ID NO: 111279 - DNA, 80 bp, synthetic construct
  source 1..80: mol_type = other DNA
gtaaggggaaatggaaaaaagtattagccaaacagaacaaggaatgaaccctagtggtcaaagagggaatatacagtctt

SEQ ID NO: 111280 - DNA, 80 bp, synthetic construct
  source 1..80: mol_type = other DNA
gaggcgggaggattacttgaggtcaggagtttgagaccagtttggctaacatggtgaaacccctgtctctactacaaata

SEQ ID NO: 111281 - DNA, 80 bp, synthetic construct
  source 1..80: mol_type = other DNA
aaaaaaaaaaaaaaaattaaaataaataaacctctgcatcagcttagtaagtgaaaattattttaaaaattttccttctc

SEQ ID NO: 111282 - DNA, 80 bp, synthetic construct; identical to SEQ ID NO: 21829
  source 1..80: mol_type = other DNA

SEQ ID NO: 111283 - DNA, 80 bp, synthetic construct
  source 1..80: mol_type = other DNA
tgcagttaagtcattttgttaagtgcaagaaagtactttgcctatcagtttcagagacattatgtgaagaattttctgat

SEQ ID NO: 111284 - DNA, 80 bp, synthetic construct
  source 1..80: mol_type = other DNA
tctacttagttaaaaaaatgaaaccagcattctctgagacaataaaatttatatttggaaaaatcagataatatccaaaa

SEQ ID NO: 111285 - DNA, 80 bp, synthetic construct
  source 1..80: mol_type = other DNA
aggcattgacaattagtaatcaaattctaggaagatgagaaatcaaagtgtatttagaagtaagaaacctttcctttaaa

SEQ ID NO: 111286 - DNA, 80 bp, synthetic construct; identical to SEQ ID NO: 21830
  source 1..80: mol_type = other DNA

SEQ ID NO: 111287 - DNA, 80 bp, synthetic construct
  source 1..80: mol_type = other DNA
tatcagagctattcttggtgtgcttaactttatcattgagtaatataaccttgaacattctcaacaggcaaagagagtct

SEQ ID NO: 111288 - DNA, 80 bp, synthetic construct
  source 1..80: mol_type = other DNA
cagatttaaataatgggtcagcactggcaagaaatagtcatacaaacacttgtacataggcatttagcacacacaaataa

SEQ ID NO: 111289 - DNA, 80 bp, synthetic construct
  source 1..80: mol_type = other DNA
catgaatcggtgagcctctaatcctaaaaacaaaactacacagtcaagactgtgtagttttgcttttctatgcaatccct

SEQ ID NO: 111290 - DNA, 80 bp, synthetic construct
  source 1..80: mol_type = other DNA
tcacataccacctgttcttctgattgacagtgctaaatttagtacctcaaaggagacttcaccaaggaaatagaactgta

SEQ ID NO: 111291 - DNA, 80 bp, synthetic construct; identical to SEQ ID NO: 21831
  source 1..80: mol_type = other DNA

SEQ ID NO: 111292 - DNA, 80 bp, synthetic construct
  source 1..80: mol_type = other DNA
gagcttattgcttatacaaccctgcaagatataatgttgaaaggcaaaattggaactctgcttaggttagtctgtacagt

SEQ ID NO: 111293 - DNA, 80 bp, synthetic construct
  source 1..80: mol_type = other DNA
tccagacacatgaatgctgttctgctaatctctggagtttgctgttactaatgggaagtggataggaggtgatatagttg

SEQ ID NO: 111294 - DNA, 80 bp, synthetic construct
  source 1..80: mol_type = other DNA
agagactaaaatttttaatttaagttaaatttctttatgtctgtaataaaaatattccctgttatggaagaatttggcca

SEQ ID NO: 111295 - DNA, 80 bp, synthetic construct; identical to SEQ ID NO: 21832
  source 1..80: mol_type = other DNA

SEQ ID NO: 111296 - DNA, 80 bp, synthetic construct
  source 1..80: mol_type = other DNA
tgttttggagtgttcaccaattggctatctatttaagatacgtttgtgcatatttgtgtgtgggtatgtagtgtgcgtgt

SEQ ID NO: 111297 - DNA, 80 bp, synthetic construct
  source 1..80: mol_type = other DNA
actcaagagccaagaagatggaccatatgttataaacataaagtcaagtgtctgtcctcttaagctgattgtctagtcac

SEQ ID NO: 111298 - DNA, 80 bp, synthetic construct
  source 1..80: mol_type = other DNA
gattgtgtgaattaatacttaacaaacttccctttatataaatatatatatgtatgtatatattcttccctatatacata

SEQ ID NO: 111299 - DNA, 80 bp, synthetic construct
  source 1..80: mol_type = other DNA
agtaaataactaatatgctgctctgaaaaagagttcttattattggaatagtaatggacagtatatgatatcatggtatg

SEQ ID NO: 111300 - DNA, 80 bp, synthetic construct; identical to SEQ ID NO: 21833
  source 1..80: mol_type = other DNA

SEQ ID NO: 111301 - DNA, 80 bp, synthetic construct
  source 1..80: mol_type = other DNA
gtgctagtgatggctaggcagagctgaccaagaaaagacagttagaattattgtgctcttagagatcatggtctacatca

SEQ ID NO: 111302 - DNA, 80 bp, synthetic construct
  source 1..80: mol_type = other DNA
aggaaggacttactgggagttattcgagaaatgggtacagttttgaaggccaatgcaaggatactagaagagagtaaaac

SEQ ID NO: 111303 - DNA, 80 bp, synthetic construct
  source 1..80: mol_type = other DNA
ctgtaatttcctttccactcataaaatatatcaaagctgaaatataggctcatcatggagctatttttaaacaaggaaat

SEQ ID NO: 111304 - DNA, 80 bp, synthetic construct; identical to SEQ ID NO: 21834
  source 1..80: mol_type = other DNA

SEQ ID NO: 111305 - DNA, 80 bp, synthetic construct
  source 1..80: mol_type = other DNA
gaaagataaaaaaattaaagtcttgaatgtctcagtagcactgctgttaggggcacttggaatttctctcctattctacc

SEQ ID NO: 111306 - DNA, 80 bp, synthetic construct
  source 1..80: mol_type = other DNA
tgtttgctgctgccaggcatgacactaagaaaataatttctgtgcttggtagtattgatttgctcaattatctctgacta

SEQ ID NO: 111307 - DNA, 80 bp, synthetic construct; identical to SEQ ID NO: 21835
  source 1..80: mol_type = other DNA

SEQ ID NO: 111308 - DNA, 80 bp, synthetic construct
  source 1..80: mol_type = other DNA
ctctttcagggccaaaaacatgtttgggagctgaaaaataagttttgctttgaaatacaaaaagaaatctgcaacaatga

SEQ ID NO: 111309 - DNA, 80 bp, synthetic construct
  source 1..80: mol_type = other DNA
cagtctctgtgggacaaaaatctaaaaatggccctcaaagctctacagtctcaaaaaacaaaggttaatctttgtttttt

SEQ ID NO: 111310 - DNA, 80 bp, synthetic construct
  source 1..80: mol_type = other DNA
ctaaagattctttagctaccactttctacctatcttctccaggctttcagggtgttttcttcaaaggccttctcaacatt

SEQ ID NO: 111311 - DNA, 80 bp, synthetic construct
  source 1..80: mol_type = other DNA
ccgactttggatcaaatcccagatgcaccagttattagcaaaatgaccctggattaatcattgaagcttcatttcttcct

SEQ ID NO: 111312 - DNA, 80 bp, synthetic construct; identical to SEQ ID NO: 21836
  source 1..80: mol_type = other DNA

SEQ ID NO: 111313 - DNA, 80 bp, synthetic construct
  source 1..80: mol_type = other DNA
catgagtagagcgtaaacatttactctataaccatatacatatgcttatctgtcttcctccagtgtcaggggaaaatggg

SEQ ID NO: 111314 - DNA, 80 bp, synthetic construct
  source 1..80: mol_type = other DNA
cagccactctacttgatacattgttttcccatttaattataactgagcttattgctgtattaatttctttatttcttatt

SEQ ID NO: 111315 - DNA, 80 bp, synthetic construct; identical to SEQ ID NO: 21837
  source 1..80: mol_type = other DNA

SEQ ID NO: 111316 - DNA, 80 bp, synthetic construct
  source 1..80: mol_type = other DNA
attctttctgaaccctctttcagcttcttttctcattgttcttgcactattcatattgtgttttccactgcctttcttat

SEQ ID NO: 111317 - DNA, 80 bp, synthetic construct
  source 1..80: mol_type = other DNA
tgtgttgagtgactgaaaagtcaatgagttcatagcactaaacttgaactatttctcaggctatgtcttcctttggcctt

SEQ ID NO: 111318 - DNA, 80 bp, synthetic construct
  source 1..80: mol_type = other DNA
ctgacttattcatgagcagttctcctcctgttggtcttcatcaggttctacctcttcttactcttgtgttttcccggggt

SEQ ID NO: 111319 - DNA, 80 bp, synthetic construct
  source 1..80: mol_type = other DNA
atctgtccttctcctggatttttccatctgagttaataacatcacaatctattcaatcacctaagtgagaactctgggaa

SEQ ID NO: 111320 - DNA, 80 bp, synthetic construct; identical to SEQ ID NO: 21838
  source 1..80: mol_type = other DNA

SEQ ID NO: 111321 - DNA, 80 bp, synthetic construct
  source 1..80: mol_type = other DNA
ttttgcagcactgactagaacaacgatcgacacatagtagctccttggtatgggctaaaatgtgaaccctccaaaattca

SEQ ID NO: 111322 - DNA, 80 bp, synthetic construct
  source 1..80: mol_type = other DNA
cagatcgctggagcccaggagttcaacaccaggctgggcaacatagcaagatcttgtctgtcttaaaaaagaaaaacaaa

SEQ ID NO: 111323 - DNA, 80 bp, synthetic construct; identical to SEQ ID NO: 21839
  source 1..80: mol_type = other DNA

SEQ ID NO: 111324 - DNA, 80 bp, synthetic construct
  source 1..80: mol_type = other DNA
aaatatgatgacaatttgagcttttggtgaccaactttctcagaatccctgaatcatattttaaggaaatgagagtggag

SEQ ID NO: 111325 - DNA, 80 bp, synthetic construct
  source 1..80: mol_type = other DNA
tgtcaaaatgaaggaacacttatcatctgtaatgtgaatctttgtctccctccatctctgctgatagattgtgatttggg

SEQ ID NO: 111326 - DNA, 80 bp, synthetic construct
  source 1..80: mol_type = other DNA
catctctagattccttataatacctaatacaatgtaagtgctatgtaaatagttatgttgtattttttatttgtattttt

SEQ ID NO: 111327 - DNA, 80 bp, synthetic construct; identical to SEQ ID NO: 21840
  source 1..80: mol_type = other DNA

SEQ ID NO: 111328 - DNA, 80 bp, synthetic construct
  source 1..80: mol_type = other DNA
ttgttcttcatcttcttccttctctccctaaagcctggcaatcactggtttcttattgtctctgtactgttttctttttc

SEQ ID NO: 111329 - DNA, 80 bp, synthetic construct
  source 1..80: mol_type = other DNA
tccttagtgtctttccatgccttagtcgtgtacttcttattgcctaagattctactgtatgtatgtatctcagtttgttt

SEQ ID NO: 111330 - DNA, 80 bp, synthetic construct
  source 1..80: mol_type = other DNA
tatgttcagttttgtaagaaactgccgaactgtcttccaaagtggctctgccgttttgcgttcccaccaacagtgagtga

SEQ ID NO: 111331 - DNA, 80 bp, synthetic construct; identical to SEQ ID NO: 21841
  source 1..80: mol_type = other DNA

SEQ ID NO: 111332 - DNA, 80 bp, synthetic construct
  source 1..80: mol_type = other DNA
tcacatgggttatggatacttccacatatgagtatttatacttagaaacaggataacctccacaaaagagttttagttcc

SEQ ID NO: 111333 - DNA, 80 bp, synthetic construct
  source 1..80: mol_type = other DNA
gtcttgtgaataaatatttcattcatttatgtgttgtatacctgagaacatggcctcaaatataagaatttagctgaaac

SEQ ID NO: 111334 - DNA, 80 bp, synthetic construct
  source 1..80: mol_type = other DNA
aaaaccacatgacctacttcagtatctccaggtaccacttagaagtcatctttgaaccaagtgacacatggtcctgatct

SEQ ID NO: 111335 - DNA, 80 bp, synthetic construct; identical to SEQ ID NO: 21842
  source 1..80: mol_type = other DNA

SEQ ID NO: 111336 - DNA, 80 bp, synthetic construct
  source 1..80: mol_type = other DNA
tccgccaccatgcctgcctaatttttgtatttttagtagagacgagatttcactatgttggccaggctggtcccaaactc

SEQ ID NO: 111337 - DNA, 80 bp, synthetic construct
  source 1..80: mol_type = other DNA
aacaatgtcaaatttctttttactgcattcttaccacctcctaatgtctagcaatgatcaataattcccctgactgaaaa

SEQ ID NO: 111338 - DNA, 80 bp, synthetic construct
  source 1..80: mol_type = other DNA
ctcccccaaccctcaacaggccccaaggtgtgtagttcccctccctgtgtccatctgttctcattgtttaactaccactt

SEQ ID NO: 111339 - DNA, 80 bp, synthetic construct
  source 1..80: mol_type = other DNA
agtctatcattgatgggtgtttgggttgatttcatgtttttgctattgtaaatagtgctgcaatgaacatacatgggcat

SEQ ID NO: 111340 - DNA, 80 bp, synthetic construct; identical to SEQ ID NO: 21843
  source 1..80: mol_type = other DNA

SEQ ID NO: 111341 - DNA, 80 bp, synthetic construct
  source 1..80: mol_type = other DNA
gacagatttaaacagaagtaataaagacgacatttggaactacgcatgtagccattgattgcaagtgtacttaggggcct

SEQ ID NO: 111342 - DNA, 80 bp, synthetic construct
  source 1..80: mol_type = other DNA
cattttgctgatatgtcagggcagtggtatgtcaggaattttagctctcataacaaatttattcaactacttaaaactat

SEQ ID NO: 111343 - DNA, 80 bp, synthetic construct
  source 1..80: mol_type = other DNA
tctgaattgtactgacaaaacaccagtgtgtaatcttgaccaagcttatgctatcttgtttccttaaatagtggttctca

SEQ ID NO: 111344 - DNA, 80 bp, synthetic construct; identical to SEQ ID NO: 21844
  source 1..80: mol_type = other DNA

SEQ ID NO: 111345 - DNA, 80 bp, synthetic construct
  source 1..80: mol_type = other DNA
tatatagaacattttctggtcagtgtacacacaagttgaatggtttttgaaaagcattctactgcattaaaggacataaa

SEQ ID NO: 111346 - DNA, 80 bp, synthetic construct
  source 1..80: mol_type = other DNA
acacggcagttgattagaaagatgtagttacttctgtttgaaaatgtagctgctgctctgccctctggctcactttgaaa

SEQ ID NO: 111347 - DNA, 80 bp, synthetic construct; identical to SEQ ID NO: 21845
  source 1..80: mol_type = other DNA

SEQ ID NO: 111348 - DNA, 80 bp, synthetic construct
  source 1..80: mol_type = other DNA
tttggaagaaaattgtgaactatattctatttgtaattactttacatgcaataaagtaatttttccctgagaatgagatc

SEQ ID NO: 111349 - DNA, 80 bp, synthetic construct
  source 1..80: mol_type = other DNA
gatttttaaattgcctgaaactggtactgagctcttcattaaagcaggtaccatgtgcgtggacattttgatagcccttt

SEQ ID NO: 111350 - DNA, 80 bp, synthetic construct
  source 1..80: mol_type = other DNA
ttagagtgctacagtcttataagggtatctatctatgaagttcctcaaggttccacatgttaaagatgtcaaagtgactt

SEQ ID NO: 111351 - DNA, 80 bp, synthetic construct; identical to SEQ ID NO: 21846
  source 1..80: mol_type = other DNA

SEQ ID NO: 111352 - DNA, 80 bp, synthetic construct
  source 1..80: mol_type = other DNA
tcttctgcttcccaggaaatttcctttaaattttgttctaaaccttgactgttctcttgatcatttggccccaaacacca

SEQ ID NO: 111353 - DNA, 80 bp, synthetic construct; identical to SEQ ID NO: 21847
  source 1..80: mol_type = other DNA

SEQ ID NO: 111354 - DNA, 80 bp, synthetic construct
  source 1..80: mol_type = other DNA
gaacacttttacactgttggtgggactgtaaactagttcaaccattgtggaagactgtggtgattcctcaaggatctaga

SEQ ID NO: 111355 - DNA, 80 bp, synthetic construct
  source 1..80: mol_type = other DNA
tggattaagaaaatgtggcacatatacaacatggaatactatgcagccataaaaaatgatgagttcatgtcctttgtagg

SEQ ID NO: 111356 - DNA, 80 bp, synthetic construct
  source 1..80: mol_type = other DNA
agtggggagggatagcattaggagatatacctaatgtaaatgacgagttaatgggtgcagcacagcagcatggcacatgt

SEQ ID NO: 111357 - DNA, 80 bp, synthetic construct; identical to SEQ ID NO: 21848
  source 1..80: mol_type = other DNA

SEQ ID NO: 111358 - DNA, 80 bp, synthetic construct
  source 1..80: mol_type = other DNA
agggcaacatcaatggagggccgtttatctcatctatgttatctctaaatggaaatgtttatatcagacatataaaggca

SEQ ID NO: 111359 - DNA, 80 bp, synthetic construct; identical to SEQ ID NO: 21849
  source 1..80: mol_type = other DNA

SEQ ID NO: 111360 - DNA, 80 bp, synthetic construct
  source 1..80: mol_type = other DNA
tgagttggagaaatttcatttattaagtgcattttgagtcaatagttatataagaataagcatcctctatctgcaaaagt

SEQ ID NO: 111361 - DNA, 80 bp, synthetic construct
  source 1..80: mol_type = other DNA
tcccgcagtaatcatgtatgctttagtaaccttaagatatgagctagaaaaattcatctttaaagatctagattcagtac

SEQ ID NO: 111362 - DNA, 80 bp, synthetic construct
  source 1..80: mol_type = other DNA
aatttaaatgaatttatatctgaggttgctatatgtgtacacctatcttaacaatgttttccccccttccaacagctatc

SEQ ID NO: 111363 - DNA, 80 bp, synthetic construct; identical to SEQ ID NO: 21850
  source 1..80: mol_type = other DNA

SEQ ID NO: 111364 - DNA, 80 bp, synthetic construct
  source 1..80: mol_type = other DNA
ccaacaatttcttatatttaaagaaatggtataggcttttctaattctgagattctctacgagatggtatcattccgcta

SEQ ID NO: 111365 - DNA, 80 bp, synthetic construct
  source 1..80: mol_type = other DNA
cctggccaacatggagaaacaccatctctattaaaagcacaaaaattagccagcatggtggtgtgcacctgtgccagcta

SEQ ID NO: 111366 - DNA, 80 bp, synthetic construct
  source 1..80: mol_type = other DNA
aaaaaaaaaaaaaaaaagtcagctgcaactgaggaccagcccctgtaccttagactgtgctcctgacttgtccaggaaca

SEQ ID NO: 111367 - DNA, 80 bp, synthetic construct; identical to SEQ ID NO: 21851
  source 1..80: mol_type = other DNA

SEQ ID NO: 111368 - DNA, 80 bp, synthetic construct
  source 1..80: mol_type = other DNA
ttaacatttagacaatacaaaacaattagttgcattgaaaagtttccagttaactaaaagtgccaaaatagccgtttgta

SEQ ID NO: 111369 - DNA, 80 bp, synthetic construct
  source 1..80: mol_type = other DNA
tattttagcttaggtttctaagaagaaatcttagaaataatactagcagccagggcccatccttgctgatagaaaagtac

SEQ ID NO: 111370 - DNA, 80 bp, synthetic construct
  source 1..80: mol_type = other DNA
attattggagaaagcccagctcagcaatcctgtaattacaatttccttctattttttctctcttgatctgttgataacga

SEQ ID NO: 111371 - DNA, 80 bp, synthetic construct; identical to SEQ ID NO: 21852
  source 1..80: mol_type = other DNA

SEQ ID NO: 111372 - DNA, 80 bp, synthetic construct
  source 1..80: mol_type = other DNA
atcttagtaacttttatgttttcttgtcatattcactagttagtgtttccagtcaacattgaataagagtggtaagagag

SEQ ID NO: 111373 - DNA, 80 bp, synthetic construct
  source 1..80: mol_type = other DNA
acattatttttcttcttttgcctgtggatgtggtggattcactgattgatttgtgaattttgaaagagccgtatatacct

SEQ ID NO: 111374 - DNA, 80 bp, synthetic construct
  source 1..80: mol_type = other DNA
ttcttgtaatacctttacctggttttactattagcataattctgacccaagagaataagtttaaaaagagttctctctgc

SEQ ID NO: 111375 - DNA, 80 bp, synthetic construct
  source 1..80: mol_type = other DNA
ctatttctgcttgtgtgagttttggtagtttgtctttcaaggaattgatctagttcatttcagttatcaaatttgtgagc

SEQ ID NO: 111376 - DNA, 80 bp, synthetic construct; identical to SEQ ID NO: 21853
  source 1..80: mol_type = other DNA

SEQ ID NO: 111377 - DNA, 80 bp, synthetic construct
  source 1..80: mol_type = other DNA
tctacatgttatttagaagtgtgctgtttaatctacaggtatttctggatttttgagctttgttattaatttcttgtttc

SEQ ID NO: 111378 - DNA, 80 bp, synthetic construct
  source 1..80: mol_type = other DNA
tcaattagatgaagtagattgatagtgctgtttaggtcatgtatttcctaatttttgactgttagtaatcccattttttg

SEQ ID NO: 111379 - DNA, 80 bp, synthetic construct; identical to SEQ ID NO: 21854
  source 1..80: mol_type = other DNA

SEQ ID NO: 111380 - DNA, 80 bp, synthetic construct
  source 1..80: mol_type = other DNA
caaaagtccaaagtctaagccaaaacaagcattctctgtccaagggctttagggaaatatatttcctcacttcttttagc

SEQ ID NO: 111381 - DNA, 80 bp, synthetic construct
  source 1..80: mol_type = other DNA
tttagggtccaccttgacactactgaacccggtagagtcctcttactgggtaacaaaaattgtcatgtagaaacatttta

SEQ ID NO: 111382 - DNA, 80 bp, synthetic construct
  source 1..80: mol_type = other DNA
acccctaagtggaacatagcatacaaatctttcagctttccatagaccccattttctcaccagaaattatgttctttggg

SEQ ID NO: 111383 - DNA, 80 bp, synthetic construct; identical to SEQ ID NO: 21855
  source 1..80: mol_type = other DNA

SEQ ID NO: 111384 - DNA, 80 bp, synthetic construct
  source 1..80: mol_type = other DNA
aggtggctgtctgccatcattagcataatatgcgttggagacaatttgccatggataaagtaggtccctttatatttcac

SEQ ID NO: 111385 - DNA, 80 bp, synthetic construct
  source 1..80: mol_type = other DNA
tggagctgctattttacaagtattgatgtttacatgcattctaaatggaaaaagagccacggcaagcagccatgagaata

SEQ ID NO: 111386 - DNA, 80 bp, synthetic construct
  source 1..80: mol_type = other DNA
ttaattttgtggtacaaaaaggaggatccaatgaatccgatttgccatgtcctgggttacacaaatgaaactgctgttga

SEQ ID NO: 111387 - DNA, 80 bp, synthetic construct; identical to SEQ ID NO: 21856
  source 1..80: mol_type = other DNA

SEQ ID NO: 111388 - DNA, 80 bp, synthetic construct
  source 1..80: mol_type = other DNA
tcagagcatactggaaggagatattttattttgtttcaactaacttatttcatggctgcacttaaaatgctgtgcataca

SEQ ID NO: 111389 - DNA, 80 bp, synthetic construct
  source 1..80: mol_type = other DNA
tgtatgaaatactggtttcaaataagatctgttcacagcccagactactgagccccagctacaattaaatattgatcatt

SEQ ID NO: 111390 - DNA, 80 bp, synthetic construct
  source 1..80: mol_type = other DNA
tccaggaacaacaatcctggacctttcctctttcctccttactattattttagtccgtggagccagcatctatttttaaa

SEQ ID NO: 111391 - DNA, 80 bp, synthetic construct; identical to SEQ ID NO: 21857
  source 1..80: mol_type = other DNA

SEQ ID NO: 111392 - DNA, 80 bp, synthetic construct
  source 1..80: mol_type = other DNA
aggtgctgacagtgcacatggcaggaccatctactctggacttgatgggtcaggaggcttcccaggggaagttgtgtctc

SEQ ID NO: 111393 - DNA, 80 bp, synthetic construct; identical to SEQ ID NO: 21858
  source 1..80: mol_type = other DNA

SEQ ID NO: 111394 - DNA, 80 bp, synthetic construct
  source 1..80: mol_type = other DNA
gagttcaagaccagcctgaccaacatggcgaaacccgtctctactaaaaatacaaaaattagccgggcgtggtggcgggc

SEQ ID NO: 111395 - DNA, 80 bp, synthetic construct
  source 1..80: mol_type = other DNA
ttctttatagtaatgcaaaaatgaactaatccagagagtaagtaaacaggaggaaggaccacctagatcagaagcttacc

SEQ ID NO: 111396 - DNA, 80 bp, synthetic construct; identical to SEQ ID NO: 21859
  source 1..80: mol_type = other DNA

SEQ ID NO: 111397 - DNA, 80 bp, synthetic construct
  source 1..80: mol_type = other DNA
atattatgtcaataggtcacagaggcaacagacaggcaaggtatggttatgagaaaaacatttccctaaacaaaattaga

SEQ ID NO: 111398 - DNA, 80 bp, synthetic construct
  source 1..80: mol_type = other DNA
tcaacttaagtgtccaatttaatccatcaactggattaaaaaactgtggtacatatataccacgggataatactcagcca

SEQ ID NO: 111399 - DNA, 80 bp, synthetic construct
  source 1..80: mol_type = other DNA
ggtgcatgcctgtaatcccagctactcgggaggctgaggcaggagaatcgcttgaacctgggaggcggaggttgcggtga

SEQ ID NO: 111400 - DNA, 80 bp, synthetic construct; identical to SEQ ID NO: 21860
  source 1..80: mol_type = other DNA

SEQ ID NO: 111401 - DNA, 80 bp, synthetic construct
  source 1..80: mol_type = other DNA
gtgccatgactgtgccactgtactccagcccagatgacaaagactatgctttaaaaaaatgaaaatttaaaaatcctgca

SEQ ID NO: 111402 - DNA, 80 bp, synthetic construct; identical to SEQ ID NO: 21861
  source 1..80: mol_type = other DNA

SEQ ID NO: 111403 - DNA, 80 bp, synthetic construct
  source 1..80: mol_type = other DNA
attaatattttactgttcttagtttattacatatctatccatgtctgtatccattgatcaatccatcttatttctcttgg

SEQ ID NO: 111404 - DNA, 80 bp, synthetic construct
  source 1..80: mol_type = other DNA
gttttgaagaatgcatacacccgtgtaaccaaacccctttcaagatgtgaaaatgaccatgaccccagaaaataccaata

SEQ ID NO: 111405 - DNA, 80 bp, synthetic construct
  source 1..80: mol_type = other DNA
tctaggttgtgtgtaccagtaacacatttctttttgtagaaaagaaactattttgcaatggaatgcagtagcgttctatt

SEQ ID NO: 111406 - DNA, 80 bp, synthetic construct; identical to SEQ ID NO: 21862
  source 1..80: mol_type = other DNA

SEQ ID NO: 111407 - DNA, 80 bp, synthetic construct
  source 1..80: mol_type = other DNA
tcaatctcccagactcaagtgatccttctgcctctgcctccagagtagatgggaccacaggcacgcaccacatcaagcta

SEQ ID NO: 111408 - DNA, 80 bp, synthetic construct
  source 1..80: mol_type = other DNA
cccaaggtccgctgaatgcccttcacctcactcggaattctagagcatccgaggatctttccattccatatgatacacac

SEQ ID NO: 111409 - DNA, 80 bp, synthetic construct
  source 1..80: mol_type = other DNA
aattagaaatggagacactggaaagagacatttagttaaaagtggacacagaaggaaaaagacacacaagcaaagcattc

SEQ ID NO: 111410 - DNA, 80 bp, synthetic construct; identical to SEQ ID NO: 21863
  source 1..80: mol_type = other DNA

SEQ ID NO: 111411 - DNA, 80 bp, synthetic construct
  source 1..80: mol_type = other DNA
ctctcatacatactccagtaatatttggccaaaagtagaagccagggggttagaaaaagaaataggataaaccaagacaa

SEQ ID NO: 111412 - DNA, 80 bp, synthetic construct
  source 1..80: mol_type = other DNA
tcttcagcccagcttctaggatcttacctcaagagagtcttaaaattatgaaaagatatgtatataaggatgtttgctac

SEQ ID NO: 111413 - DNA, 80 bp, synthetic construct
  source 1..80: mol_type = other DNA
gccaacacggtgaaaccccatctctactaaaaatacaaaaagttagccatgtgtggtggcggatgcctgtaatcccagct

SEQ ID NO: 111414 - DNA, 80 bp, synthetic construct
  source 1..80: mol_type = other DNA
tggattaatgaagcattgaaagttacaacccttttggtaattgcaagggaacctggaatagatctacccaccatgctatc

SEQ ID NO: 111415 - DNA, 80 bp, synthetic construct; identical to SEQ ID NO: 21864
  source 1..80: mol_type = other DNA

SEQ ID NO: 111416 - DNA, 80 bp, synthetic construct
  source 1..80: mol_type = other DNA
gacaggccctatgctgagcatttctcatactattgtctgatttgatcctcacaacagtcctagtgatcagtactatctat

SEQ ID NO: 111417 - DNA, 80 bp, synthetic construct
  source 1..80: mol_type = other DNA
acaagaaaaaagccaaggttaagggcacttcagaacttcagaaaaacatttgttgcctcttccaatttttggatttgttg

SEQ ID NO: 111418 - DNA, 80 bp, synthetic construct; identical to SEQ ID NO: 21865
  source 1..80: mol_type = other DNA

SEQ ID NO: 111419 - DNA, 80 bp, synthetic construct
  source 1..80: mol_type = other DNA
tggtttaaaaaactcataagatctttgcaagagaacagatcctggattgtgggaagggtccccagcttgctcagtagagc

SEQ ID NO: 111420 - DNA, 80 bp, synthetic construct
  source 1..80: mol_type = other DNA
acaatcacaaagagaattaaaagaagcttgagagaccaactagtccaatcctcccattaggacatacctcccgaccagtg

SEQ ID NO: 111421 - DNA, 80 bp, synthetic construct
  source 1..80: mol_type = other DNA
cttaagtttcactggagtccctcttgctactatttccagctaatctcttcttgtaactcttcataaaagaggcatcaatc

SEQ ID NO: 111422 - DNA, 80 bp, synthetic construct
  source 1..80: mol_type = other DNA
aggagcttatgttttcatggggtaaagtagatgtttaaagaaatgatggcagcagagtgttattgtgtaaagttctgaca

SEQ ID NO: 111423 - DNA, 80 bp, synthetic construct; identical to SEQ ID NO: 21866
  source 1..80: mol_type = other DNA

SEQ ID NO: 111424 - DNA, 80 bp, synthetic construct
  source 1..80: mol_type = other DNA
ctcatttttcactactttctctctaacagttggcagctgatgatgagtagtgagtgcagctaacgatggggattaccatg

SEQ ID NO: 111425 - DNA, 80 bp, synthetic construct
  source 1..80: mol_type = other DNA
ttgttctactctcctaagctcccttctgctttctctgcaaaccgtagtgctttcccgctgctttccttgaactctctcct

SEQ ID NO: 111426 - DNA, 80 bp, synthetic construct
  source 1..80: mol_type = other DNA
acctcttctcttccactttctagtgatttctagaaaacctttcctccctgcttacagatgccccctaacttgcagacacc

SEQ ID NO: 111427 - DNA, 80 bp, synthetic construct; identical to SEQ ID NO: 21867
  source 1..80: mol_type = other DNA

SEQ ID NO: 111428 - DNA, 80 bp, synthetic construct
  source 1..80: mol_type = other DNA
acccagaggcattttaggaaaacaggagggagatgcaagacagcttaagttaacccagaaatgactactttaaaccataa

SEQ ID NO: 111429 - DNA, 80 bp, synthetic construct
  source 1..80: mol_type = other DNA
aagtagagtcactgtggatatcatggaagaagagacaggatagggattagacctgacacaattgtgggagaagctgggaa

SEQ ID NO: 111430 - DNA, 80 bp, synthetic construct
  source 1..80: mol_type = other DNA
gatgtgtgggtagggagtgttggccactgcaggtctacggccaagtggctggtggtgggccaacaatcagaaagaagacc

SEQ ID NO: 111431 - DNA, 80 bp, synthetic construct; identical to SEQ ID NO: 21868
  source 1..80: mol_type = other DNA

SEQ ID NO: 111432 - DNA, 80 bp, synthetic construct
  source 1..80: mol_type = other DNA
catgcactgaacattcatcacatagtagctgacgtgtaacagattctccgatgagcaatataattcattacctacacatg

SEQ ID NO: 111433 - DNA, 80 bp, synthetic construct
  source 1..80: mol_type = other DNA
aatcaataactgttctttcaacaaggatggagagcaattgaaaaggttggctgtgacatgaaattgcagtgtggctgcaa

SEQ ID NO: 111434 - DNA, 80 bp, synthetic construct
  source 1..80: mol_type = other DNA
caggacctgccttgtgtcccaatcctggctcccagcatcagagggaaagttgtgaaaaggtgctgctttctcccagataa

SEQ ID NO: 111435 - DNA, 80 bp, synthetic construct; identical to SEQ ID NO: 21869
  source 1..80: mol_type = other DNA

SEQ ID NO: 111436 - DNA, 80 bp, synthetic construct
  source 1..80: mol_type = other DNA
cagagatttgctctgaaccttggcttctgctgactcaatcatcaggctttggatgtattaacacaactttgccctttgtt

SEQ ID NO: 111437 - DNA, 80 bp, synthetic construct
  source 1..80: mol_type = other DNA
acgtggaactagtccataggactgtgtataacaaagcttcatgggaatttttctagggtcacaatatattttcagttgaa

SEQ ID NO: 111438 - DNA, 80 bp, synthetic construct
  source 1..80: mol_type = other DNA
cttagagttgaatgcatagacaccaaaaaggggaaagtttgaaaaatcagctatagtaccaagaagaaatcaatgcccag

SEQ ID NO: 111439 - DNA, 80 bp, synthetic construct; identical to SEQ ID NO: 21870
  source 1..80: mol_type = other DNA

SEQ ID NO: 111440 - DNA, 80 bp, synthetic construct
  source 1..80: mol_type = other DNA
aatacacttgcacacaaattattctaactgccttatttagccagagaagaacagggcctgtccgtgaagcatttccccat

SEQ ID NO: 111441 - DNA, 80 bp, synthetic construct
  source 1..80: mol_type = other DNA
gctactccaaatctgattgggtccctctacgtaggtgtttccaagtggtaaactgcacctagtgctatcgtttggatatc

SEQ ID NO: 111442 - DNA, 80 bp, synthetic construct; identical to SEQ ID NO: 21871
  source 1..80: mol_type = other DNA

SEQ ID NO: 111443 - DNA, 80 bp, synthetic construct
  source 1..80: mol_type = other DNA
ggacacctagacatccaggtttataaatgtagacacatatatacgtgcattttcacacatagcttgttagaatgtgtgtg

SEQ ID NO: 111444 - DNA, 80 bp, synthetic construct
  source 1..80: mol_type = other DNA
ccatatttttattttcattgaaagttaactaaaattattgaaaagaatgaaaaataataagaaacagaaaaacctaatag

SEQ ID NO: 111445 - DNA, 80 bp, synthetic construct
  source 1..80: mol_type = other DNA
cactgcaacctctgcctcccaggttccagtgattctcctgcctcagcctcctgggtagctgggattacaggcacatacca

SEQ ID NO: 111446 - DNA, 80 bp, synthetic construct; identical to SEQ ID NO: 21872
  source 1..80: mol_type = other DNA

SEQ ID NO: 111447 - DNA, 80 bp, synthetic construct
  source 1..80: mol_type = other DNA
ccagctactcaggaggctgaggcaggagaatcgcttgaacccgggaggcagaggttgcagtgagccaagatcacgcctag

SEQ ID NO: 111448 - DNA, 80 bp, synthetic construct
  source 1..80: mol_type = other DNA
ttccctcttggtctacatgtggattaggtcccccaccagtaaaaactcctccctaatagttctcacagttgttcacctaa

SEQ ID NO: 111449 - DNA, 80 bp, synthetic construct
  source 1..80: mol_type = other DNA
tttctctgggttaaagctccatggttgctaattgctgtgagagtgatagagtcccctaagtctaatcaagcctggaagct

SEQ ID NO: 111450 - DNA, 80 bp, synthetic construct
  source 1..80: mol_type = other DNA
cactcctgagctcaagcaatcctcctgcctcagcctcctaagtagctgggactatgggatatgccactatgcccagctaa

SEQ ID NO: 111451 - DNA, 80 bp, synthetic construct; identical to SEQ ID NO: 21873
  source 1..80: mol_type = other DNA

SEQ ID NO: 111452 - DNA, 80 bp, synthetic construct
  source 1..80: mol_type = other DNA
taggtgagtggataaacaaattgtagtgcatccacacaacaaaatacgattcaacgataaaaagaaatgaggtatcaggc

SEQ ID NO: 111453 - DNA, 80 bp, synthetic construct
  source 1..80: mol_type = other DNA
gtagggaaagagagggggataactaggcggaatacagggggattttagggcagtgaaactattccatatgatacggtgat

SEQ ID NO: 111454 - DNA, 80 bp, synthetic construct; identical to SEQ ID NO: 21874
  source 1..80: mol_type = other DNA

SEQ ID NO: 111455 - DNA, 80 bp, synthetic construct
  source 1..80: mol_type = other DNA
ttaccaatcttcagcaatgcagaggaggaaccagagactctgggagacctgagattcatctgcacacccagaaggtggta

SEQ ID NO: 111456 - DNA, 80 bp, synthetic construct
  source 1..80: mol_type = other DNA
ctgcctaaggagattttctctgcaagaacagaggataatgaattctcctaaagaatgagagaaatcccagaggtaaacag

SEQ ID NO: 111457 - DNA, 80 bp, synthetic construct
  source 1..80: mol_type = other DNA
agccacaatgagaccaattttccacagtcctaagaagagacacatccccttctgtgtatacatttctcttgtattcactg

SEQ ID NO: 111458 - DNA, 80 bp, synthetic construct; identical to SEQ ID NO: 21875
  source 1..80: mol_type = other DNA

SEQ ID NO: 111459 - DNA, 80 bp, synthetic construct
  source 1..80: mol_type = other DNA
agtgcagactcctcccgcgagctcaggtcagggcacagtctggctgccgtcaaggtttggatcttaatctccgatttggc

SEQ ID NO: 111460 - DNA, 80 bp, synthetic construct
  source 1..80: mol_type = other DNA
cctactttaacctgttctcccagccaagcaggagcaaaccacatctgacttaatatactcttgtggaagatctacctgct

SEQ ID NO: 111461 - DNA, 80 bp, synthetic construct
  source 1..80: mol_type = other DNA
aaaatttcagtgctagaactcccttctcctccctgcttcatttctgtatctttgaatcttatcatttgctctagacccca

SEQ ID NO: 111462 - DNA, 80 bp, synthetic construct; identical to SEQ ID NO: 21876
  source 1..80: mol_type = other DNA

SEQ ID NO: 111463 - DNA, 80 bp, synthetic construct
  source 1..80: mol_type = other DNA
aaccctcgagagcttttcttcaggaccaagggaaggtagtgctcttgttccctatctctgggcctccagagtatgagggc

SEQ ID NO: 111464 - DNA, 80 bp, synthetic construct
  source 1..80: mol_type = other DNA
agcactttgggagaccaaggcaggaggattgcttgtgttcaggagattgagaccagcctgggcaacatgaagaggcattg

SEQ ID NO: 111465 - DNA, 80 bp, synthetic construct
  source 1..80: mol_type = other DNA
gcacccatcatcatgcctggctaatttttgtatttttgtagatacagggtttcaccatgttggctaagctggtcttgaac

SEQ ID NO: 111466 - DNA, 80 bp, synthetic construct
  source 1..80: mol_type = other DNA
ggctgaggtgggaagtttgcttgagcccaggaggtcgaggctgcagtgagctgtgttcacatgacaccactccagcctag

SEQ ID NO: 111467 - DNA, 80 bp, synthetic construct; identical to SEQ ID NO: 21877
  source 1..80: mol_type = other DNA

SEQ ID NO: 111468 - DNA, 80 bp, synthetic construct
  source 1..80: mol_type = other DNA
ggcaactgatgcaacagtcacgcttgaccaatttgctgggagctgaaatcatacacaatctataaatatgacttaaactg

SEQ ID NO: 111469 - DNA, 80 bp, synthetic construct
  source 1..80: mol_type = other DNA
cgcctcccgggttcacgccattctcctgcctcagcctccccagtagctaattttttgtattacgcccggctaattttttg

SEQ ID NO: 111470 - DNA, 80 bp, synthetic construct; identical to SEQ ID NO: 21878
  source 1..80: mol_type = other DNA

SEQ ID NO: 111471 - DNA, 80 bp, synthetic construct
  source 1..80: mol_type = other DNA
aattctgatggatttacatattatattgttgacactgtatttgcattcagagcaaaaatgaaatgggtcttaaaatgagt

SEQ ID NO: 111472 - DNA, 80 bp, synthetic construct
  source 1..80: mol_type = other DNA
ccagtgttcatgaattactatggcccataaactgtgttgtgcttcttatccactattgaattcaatcctccctaacaagc

SEQ ID NO: 111473 - DNA, 80 bp, synthetic construct
  source 1..80: mol_type = other DNA
tttgcctctcaagtgaaatattatttctttgcctagcagccttcacttacagccagggtgggtgtggacagatctgtata

SEQ ID NO: 111474 - DNA, 80 bp, synthetic construct; identical to SEQ ID NO: 21879
  source 1..80: mol_type = other DNA

SEQ ID NO: 111475 - DNA, 80 bp, synthetic construct
  source 1..80: mol_type = other DNA
cagtgggctgactgcaactgtgctattaggaaaactgctaaccccaatcagcagcaatcacacttgatcttcaggatgac

SEQ ID NO: 111476 - DNA, 80 bp, synthetic construct
  source 1..80: mol_type = other DNA
agctgaattgtgttccaaaggaattgtattgactacacaagcagctaatgacatggtttacttctctggaagaatcagca

SEQ ID NO: 111477 - DNA, 80 bp, synthetic construct
  source 1..80: mol_type = other DNA
accagccttcctaagctagtgctgtctgcaaacagacctttctgtgcagattaaagagagcctgattcagtagaacccac

SEQ ID NO: 111478 - DNA, 80 bp, synthetic construct
  source 1..80: mol_type = other DNA
ttaatgtgcctagccatccctgaagttctgccctgttaacgaaataggaatttgccattgctatccttacaggtgttcac

SEQ ID NO: 111479 - DNA, 80 bp, synthetic construct; identical to SEQ ID NO: 21880
  source 1..80: mol_type = other DNA

SEQ ID NO: 111480 - DNA, 80 bp, synthetic construct
  source 1..80: mol_type = other DNA
attagataggaggaaaagttgctcatctgaccccagggacacaaaagatttatctaaaaactcagaataaagaagtttgt

SEQ ID NO: 111481 - DNA, 80 bp, synthetic construct
  source 1..80: mol_type = other DNA
ctaaggaagctttacatttgagtctgaaattaaagatgacgaaataatcctcagacaaatatagaagcccagggaaaagg

SEQ ID NO: 111482 - DNA, 80 bp, synthetic construct; identical to SEQ ID NO: 21881
  source 1..80: mol_type = other DNA

SEQ ID NO: 111483 - DNA, 80 bp, synthetic construct
  source 1..80: mol_type = other DNA
aatcaagaacatgggaaaatggcagctggattgttgagctggaatcaggaatgccagaaataggatagagggcaatgcca

SEQ ID NO: 111484 - DNA, 80 bp, synthetic construct
  source 1..80: mol_type = other DNA
gagaaattgtgaacacaaacaactctgatggaatggctaaatgttcaacagaggtacaaagcactgcatagcagagttaa

SEQ ID NO: 111485 - DNA, 80 bp, synthetic construct
  source 1..80: mol_type = other DNA
ggcgggaggatcacttgaggccaggagttcaagaccaatctggggaacatagtgagacccttatctctacaaaagtgagt

SEQ ID NO: 111486 - DNA, 80 bp, synthetic construct; identical to SEQ ID NO: 21882
  source 1..80: mol_type = other DNA

SEQ ID NO: 111487 - DNA, 80 bp, synthetic construct
  source 1..80: mol_type = other DNA
tcactttccatttctgatgtcaccagaatctcttattcctactcccataactatctctcatctggccttttctctctgta

SEQ ID NO: 111488 - DNA, 80 bp, synthetic construct
  source 1..80: mol_type = other DNA
ttcaactggtttttgaatggtcaaagcaaaaaaccaactcatgaccatctctgaatgtcagactaaggacatttgacttt

SEQ ID NO: 111489 - DNA, 80 bp, synthetic construct; identical to SEQ ID NO: 21883
  source 1..80: mol_type = other DNA

SEQ ID NO: 111490 - DNA, 80 bp, synthetic construct
  source 1..80: mol_type = other DNA
agatttaggcatgttgagcttgaggcactattgcgatgctaagagagttgagggattctgattgtgaggctgggacagaa

SEQ ID NO: 111491 - DNA, 80 bp, synthetic construct
  source 1..80: mol_type = other DNA
tagactgccatcactgctgttcatgatgagaaagtagaagtggcacagtagattaatcattagcagtgatagaagtaaga

SEQ ID NO: 111492 - DNA, 80 bp, synthetic construct
  source 1..80: mol_type = other DNA
aaataaattaagatcaatgtcaaaataggaacaatagtctggaagaatgaaagatgggggtaacccagaagaaacaatga

SEQ ID NO: 111493 - DNA, 80 bp, synthetic construct; identical to SEQ ID NO: 21884
  source 1..80: mol_type = other DNA

SEQ ID NO: 111494 - DNA, 80 bp, synthetic construct
  source 1..80: mol_type = other DNA
atctcttgatcagatgagggaactggtaccactgaagaaagctcaagagaagtgcacttgctaggagaacccagatccca

SEQ ID NO: 111495 - DNA, 80 bp, synthetic construct
  source 1..80: mol_type = other DNA
aggagtttgcacctgtgaggataaaggcgatggagcctgagttgtaggtcaatcccttttgttcactcaggtctcaggat

SEQ ID NO: 111496 - DNA, 80 bp, synthetic construct
  source 1..80: mol_type = other DNA
gaggacatcgaattaaagttaaacttgcttgtctcctaagcctctgcctttaaatagtgaatgacttcctttgtcataaa

SEQ ID NO: 111497 - DNA, 80 bp, synthetic construct
  source 1..80: mol_type = other DNA
ctcaacactgtctgttgcatccaacccttccttctataaccagtggtactacccccacccagattactattgttgacatt

SEQ ID NO: 111498 - DNA, 80 bp, synthetic construct; identical to SEQ ID NO: 21885
  source 1..80: mol_type = other DNA

SEQ ID NO: 111499 - DNA, 80 bp, synthetic construct
  source 1..80: mol_type = other DNA
aaaagccaacacactacaactgccttttttatttccttccactgctaacaaattccagggatgactgccattttctttac

SEQ ID NO: 111500 - DNA, 80 bp, synthetic construct
  source 1..80: mol_type = other DNA
tttaaatcgccatatagtaatatatgtgcatctttattagttagaaaatctagccctgggtgtcataattttaaagtagt

SEQ ID NO: 111501 - DNA, 80 bp, synthetic construct; identical to SEQ ID NO: 21886
  source 1..80: mol_type = other DNA

SEQ ID NO: 111502 - DNA, 80 bp, synthetic construct
  source 1..80: mol_type = other DNA
tctcacatcacagtttctaagttcttgggcaagtcattccatttcataaatactacctatcattattaggtatattctcc

SEQ ID NO: 111503 - DNA, 80 bp, synthetic construct
  source 1..80: mol_type = other DNA
tgcaacaacatagaggaatgttaaaaggaattatgccaacttcaagaagccacactgacaacgctatttactgcaggact

SEQ ID NO: 111504 - DNA, 80 bp, synthetic construct
  source 1..80: mol_type = other DNA
aggaaattcactacaaaatggtgtgagaaaactttctggatggaaatattacaactcttgattctgttgttaattacatg

SEQ ID NO: 111505 - DNA, 80 bp, synthetic construct
  source 1..80: mol_type = other DNA
aatagaggtctttttaataacatttcactgagaaaatacaagtgtgcatgtagactcgagaatctgcaataactccagaa

SEQ ID NO: 111506 - DNA, 80 bp, synthetic construct
  source 1..80: mol_type = other DNA
gtctctccagtttccatcctgttgttctgtcagtaacccagaactctcaataacctcttttaatttttgttctgtcaata

SEQ ID NO: 111507 - DNA, 80 bp, synthetic construct; identical to SEQ ID NO: 21887
  source 1..80: mol_type = other DNA

SEQ ID NO: 111508 - DNA, 80 bp, synthetic construct
  source 1..80: mol_type = other DNA
ttgttctcaggccatgcctagtgttcttccacttttgcacctgcactcattctggtttctatgtcttgtaaaacagattg

SEQ ID NO: 111509 - DNA, 80 bp, synthetic construct
  source 1..80: mol_type = other DNA
ctaggcctcagtgtgttatgctgaaattcccaaaccaggtgtaataaatggtttacaggaatggtcccttctgcccttgg

SEQ ID NO: 111510 - DNA, 80 bp, synthetic construct
  source 1..80: mol_type = other DNA
ataattttatctatataaaaattatttttatgcatgtggaaaactgaagaagcacagcattcagatgtctctagggccca

SEQ ID NO: 111511 - DNA, 80 bp, synthetic construct; identical to SEQ ID NO: 21888
  source 1..80: mol_type = other DNA

SEQ ID NO: 111512 - DNA, 80 bp, synthetic construct
  source 1..80: mol_type = other DNA
ccgagatcccaaagtcacttcctccctctgtgaattaccatccacctcatcaactgtttcctgttgactgggcatatttt

SEQ ID NO: 111513 - DNA, 80 bp, synthetic construct
  source 1..80: mol_type = other DNA
agtaagcccagcgtccattagctattcttcctgatgctctccctcccccacttgcccctcctccagcaggccccagtgtg

SEQ ID NO: 111514 - DNA, 80 bp, synthetic construct; identical to SEQ ID NO: 21889
  source 1..80: mol_type = other DNA

SEQ ID NO: 111515 - DNA, 80 bp, synthetic construct
  source 1..80: mol_type = other DNA
ttccacaattgttgaactaatttacactcacaccaacagtgtaaaagcgttcctttttctctgcaacctcaccagcatct

SEQ ID NO: 111516 - DNA, 80 bp, synthetic construct
  source 1..80: mol_type = other DNA
ctctcttgatagctcccatagtgatggctagctagcacagtggctcacattaggaagatgcttaatagttgcttctttta

SEQ ID NO: 111517 - DNA, 80 bp, synthetic construct
  source 1..80: mol_type = other DNA
taaatcctctttaattctggctggcgcgattgacacataccccaatgcagtctcttggtaaatggggtaagttattaaat

SEQ ID NO: 111518 - DNA, 80 bp, synthetic construct; identical to SEQ ID NO: 21890
  source 1..80: mol_type = other DNA

SEQ ID NO: 111519 - DNA, 80 bp, synthetic construct
  source 1..80: mol_type = other DNA
agacatgggtgtcttgcctgaatcatcagagctactgatatacaacaaaatcccccagatagtgacaggtgtgttctcaa

SEQ ID NO: 111520 - DNA, 80 bp, synthetic construct
  source 1..80: mol_type = other DNA
gtggaagattcttatacaagggagttctcaatggttgttcccaaccaggttggcccccaaaattcaaccaagaaactcaa

SEQ ID NO: 111521 - DNA, 80 bp, synthetic construct
  source 1..80: mol_type = other DNA
atgtgtttattcaacaatggcggaggagaggcatgccagataaggcagacacgggcattccaaacacaagaaaggtatgt

SEQ ID NO: 111522 - DNA, 80 bp, synthetic construct; identical to SEQ ID NO: 21891
  source 1..80: mol_type = other DNA

SEQ ID NO: 111523 - DNA, 80 bp, synthetic construct
  source 1..80: mol_type = other DNA
tagtgggcatttcagtatcaacagatcactgtctagcagctgacaggcaccctcagaaaataaaccaagaagaaagggtt

SEQ ID NO: 111524 - DNA, 80 bp, synthetic construct
  source 1..80: mol_type = other DNA
taaacatctatgctacagctccacagtcagattgagaggaaaaacagtacgtagctaagaaaagacatagacttgtaact

SEQ ID NO: 111525 - DNA, 80 bp, synthetic construct
  source 1..80: mol_type = other DNA
ctccaaaaagagctttcgcaaactcaaataaacacaggaaaggaagaccttcttatctttgagagtatatgtttagccct

SEQ ID NO: 111526 - DNA, 80 bp, synthetic construct; identical to SEQ ID NO: 21892
  source 1..80: mol_type = other DNA

SEQ ID NO: 111527 - DNA, 80 bp, synthetic construct
  source 1..80: mol_type = other DNA
atttatcttttcagttacaaacaatccaattacactctttattttaaaatatacaattattaattatagtcactctgttg

SEQ ID NO: 111528 - DNA, 80 bp, synthetic construct
  source 1..80: mol_type = other DNA
caatgatagttcagaaagcaagcaagtcaaagtgaccaagggcatggcctgaaaactgttctaagagaggaatttacaga

SEQ ID NO: 111529 - DNA, 80 bp, synthetic construct
  source 1..80: mol_type = other DNA
tgaaggggaagcaaagcaccttcctcacaaggcgtcaggaagaagtgccaagcaaagggggaaaagccccttgtaaaact

SEQ ID NO: 111530 - DNA, 80 bp, synthetic construct
  source 1..80: mol_type = other DNA
tcaaggatcaagtggtgggttgaaactaacaggatgagatatatcagatacaaacacagggtcccatatttgggttaaaa

SEQ ID NO: 111531 - DNA, 80 bp, synthetic construct; identical to SEQ ID NO: 21893
  source 1..80: mol_type = other DNA

SEQ ID NO: 111532 - DNA, 80 bp, synthetic construct
  source 1..80: mol_type = other DNA
gggatgctgaggatcttaggaactatgtctaaacaagattcattcacagaagtgggaatgtctatttggcaaaaagaaaa

SEQ ID NO: 111533 - DNA, 80 bp, synthetic construct
  source 1..80: mol_type = other DNA
aggcctggggagtcttgatgtctgagagtgacattctgatgatcactgtcatgtgtaaatgttggcctaaagctgccaat

SEQ ID NO: 111534 - DNA, 80 bp, synthetic construct; identical to SEQ ID NO: 21894
  source 1..80: mol_type = other DNA

SEQ ID NO: 111535 - DNA, 80 bp, synthetic construct
  source 1..80: mol_type = other DNA
tatgcttttacagcaagatagtggtttacagcttacaaaaggcttgtacatcctctcatattaaaagttattagaacagt

SEQ ID NO: 111536 - DNA, 80 bp, synthetic construct
  source 1..80: mol_type = other DNA
ctgcttcctagttaaactctaagggtctaagactccattcctagttatggtctcaactacatttgctcattgctgtgagg

SEQ ID NO: 111537 - DNA, 80 bp, synthetic construct
  source 1..80: mol_type = other DNA
tagtgctccaaaccggacttgctcttggcttgtatttgtccaaaatatttgtcttctctatgttttctacatgtttgtct

SEQ ID NO: 111538 - DNA, 80 bp, synthetic construct; identical to SEQ ID NO: 21895
  source 1..80: mol_type = other DNA

SEQ ID NO: 111539 - DNA, 80 bp, synthetic construct
  source 1..80: mol_type = other DNA
cttgttcctgcatgcccaatgcagaagagtcagtaaagaagatttggttctctgtatttcaggggcatcaatgccaggtt

SEQ ID NO: 111540 - DNA, 80 bp, synthetic construct
  source 1..80: mol_type = other DNA
cgagctgtgatcgtgccactgcactcgagccagggcgttggagtgagaccctgtcaaaaaaaaaaaaaaaaaggaaggaa

SEQ ID NO: 111541 - DNA, 80 bp, synthetic construct
  source 1..80: mol_type = other DNA
aggcttttaaaaatgtgagcactgccaagggtttttccttgttgacccatggatccatcaagtgcaaacattttctaatg

SEQ ID NO: 111542 - DNA, 80 bp, synthetic construct; identical to SEQ ID NO: 21896
  source 1..80: mol_type = other DNA

SEQ ID NO: 111543 - DNA, 80 bp, synthetic construct
  source 1..80: mol_type = other DNA
tgactaagtcaataatcagaatcagcaggtttgcagtcagattggcagggataagcagcctagctcaggagaagtgagta

SEQ ID NO: 111544 - DNA, 80 bp, synthetic construct
  source 1..80: mol_type = other DNA
attcacgctaaatgaagtagaagtgactccttccagctttgccaaccagcttttattactagggcaagggtacccagcat

SEQ ID NO: 111545 - DNA, 80 bp, synthetic construct
  source 1..80: mol_type = other DNA
atatgatattaaggaagctgttaatactgaattttcagaaaagtatccctccataaaatgtatttgggggacaaactgca

SEQ ID NO: 111546 - DNA, 80 bp, synthetic construct
  source 1..80: mol_type = other DNA
ttataacaactggtaagagggagtgactatagcaacaactaaaatgatctcaggaaaacctgtttggccctatgtatggt

SEQ ID NO: 111547 - DNA, 80 bp, synthetic construct; identical to SEQ ID NO: 21897
  source 1..80: mol_type = other DNA

SEQ ID NO: 111548 - DNA, 80 bp, synthetic construct
  source 1..80: mol_type = other DNA
tcgctccagatttctaataccacaaagaataaatcctttcactctgatcaattttgttaacttctcacgtgtcttctcta

SEQ ID NO: 111549 - DNA, 80 bp, synthetic construct
  source 1..80: mol_type = other DNA
cacaggacttggttttatcttcccgtttgcccctcacttggtagagagaggctcacatcatctgctaaagaatttacaag

SEQ ID NO: 111550 - DNA, 80 bp, synthetic construct
  source 1..80: mol_type = other DNA
acccttttgggtcacagaacactttatgtaggtgatgaaaagtaaacattctatgcccagaaaaaatgcacagatacaca

SEQ ID NO: 111551 - DNA, 80 bp, synthetic construct; identical to SEQ ID NO: 21898
  source 1..80: mol_type = other DNA

SEQ ID NO: 111552 - DNA, 80 bp, synthetic construct
  source 1..80: mol_type = other DNA
ttctacctgcactagcaaaaacttcaaggaaaatacatattaataaatctaagcaaagtgaccagaagacagagcaatca

SEQ ID NO: 111553 - DNA, 80 bp, synthetic construct
  source 1..80: mol_type = other DNA
ttgggaattcatttatgtttatataaaatgccaagcataacatgaaaagtggttacaggactattctaagggagagacag

SEQ ID NO: 111554 - DNA, 80 bp, synthetic construct
  source 1..80: mol_type = other DNA
caatttccaacattcaactatggagctggtacttacatggaaatagaagttgcctagtgtttgttgctggcaaagagtta

SEQ ID NO: 111555 - DNA, 80 bp, synthetic construct; identical to SEQ ID NO: 21899
  source 1..80: mol_type = other DNA

SEQ ID NO: 111556 - DNA, 80 bp, synthetic construct
  source 1..80: mol_type = other DNA
tggcaggcgcctgtaatcccagctaattgggaggctgaggctggagaatcccttgaatctaggaggcagaggttgcagtg

SEQ ID NO: 111557 - DNA, 80 bp, synthetic construct
  source 1..80: mol_type = other DNA
ggagttttccctacttctgacttagttgaggggaaatgttcataacatgtttataacatgtttatgtgtgttagttggtg

SEQ ID NO: 111558 - DNA, 80 bp, synthetic construct; identical to SEQ ID NO: 21900
  source 1..80: mol_type = other DNA

SEQ ID NO: 111559 - DNA, 80 bp, synthetic construct
  source 1..80: mol_type = other DNA
cacaacactctgagaagcaaatttctttttgactttgatgaaaatccacttagtaacatgacttgaacttacatgaaact

SEQ ID NO: 111560 - DNA, 80 bp, synthetic construct
  source 1..80: mol_type = other DNA
atctggcttctcggaggtctggacaagtgattcttggcaacacatacctatagagacaataaaatcaaagtaataatggc

SEQ ID NO: 111561 - DNA, 80 bp, synthetic construct
  source 1..80: mol_type = other DNA
aataacttgtcaaaggtcacaagactaggaaatacacaagtagaaatgtttacaattaaggcccaggctgggtttgccct

SEQ ID NO: 111562 - DNA, 80 bp, synthetic construct; identical to SEQ ID NO: 21901
  source 1..80: mol_type = other DNA

SEQ ID NO: 111563 - DNA, 80 bp, synthetic construct
  source 1..80: mol_type = other DNA
ggttcctttattagacaatgttaccagggaaacaacaggggtttgtttgacttctggggcccacaagtcaacaagagagc

SEQ ID NO: 111564 - DNA, 80 bp, synthetic construct
  source 1..80: mol_type = other DNA
gttgtttgcccaagagctgggtctcagcctgatgggaaccatataaaaaggttcactgacatactgcccacatgttgttc

SEQ ID NO: 111565 - DNA, 80 bp, synthetic construct
  source 1..80: mol_type = other DNA
agaaatgaaaatacatcccgacccttggaatggaagggaaaggactgaagtaagacagattaagcaggaccgtcagccca

SEQ ID NO: 111566 - DNA, 80 bp, synthetic construct; identical to SEQ ID NO: 21902
  source 1..80: mol_type = other DNA

SEQ ID NO: 111567 - DNA, 80 bp, synthetic construct
  source 1..80: mol_type = other DNA
ccaccgtgcccggctacttcatggatttttgattacagattatgcctcttacaatttttaagaagaatcaagtgggctga

SEQ ID NO: 111568 - DNA, 80 bp, synthetic construct
  source 1..80: mol_type = other DNA
ttcctcctatccctaagtaatccgggtttctttttcccatatttagaacaaaatgtatttatgcagagtgtgtccaaacc

SEQ ID NO: 111569 - DNA, 80 bp, synthetic construct
  source 1..80: mol_type = other DNA
tgactatctggaacagcattttgatccacaatttgcccagttacaaagcttaaatgagctctagtgcatgcatatatatt

SEQ ID NO: 111570 - DNA, 80 bp, synthetic construct; identical to SEQ ID NO: 21903
  source 1..80: mol_type = other DNA

SEQ ID NO: 111571 - DNA, 80 bp, synthetic construct
  source 1..80: mol_type = other DNA
tttttctaaaaccaataaaatagatacagcctttaggctttctgggatttcccttagtcaagctagggtcatcctgactt

SEQ ID NO: 111572 - DNA, 80 bp, synthetic construct
  source 1..80: mol_type = other DNA
aaatataaaagaataaaattaattaagttggcactggacttccggtggtcagtcatgtgtgtcatctgtcacgtttttcg

SEQ ID NO: 111573 - DNA, 80 bp, synthetic construct; identical to SEQ ID NO: 21904
  source 1..80: mol_type = other DNA

SEQ ID NO: 111574 - DNA, 80 bp, synthetic construct
  source 1..80: mol_type = other DNA
acccgcggatcccgcggcgtccggcccgggtggtctggatcgcggagggaatgccccggagggcggagaactgggacgag

SEQ ID NO: 111575 - DNA, 80 bp, synthetic construct
  source 1..80: mol_type = other DNA
gctcggtgaactcgcgcgagccctcccaggtcatcttctgcaatcgcagtccgcgcgtcgtgctgcccgtatggctcaac

SEQ ID NO: 111576 - DNA, 80 bp, synthetic construct
  source 1..80: mol_type = other DNA
gaactgaggccccttgaggcaggacacatccagggtgacgctgctcgtaagcgtcagagcattctttttttttttttttt

SEQ ID NO: 111577 - DNA, 80 bp, synthetic construct
  source 1..80: mol_type = other DNA
atatttttagtagagacggggtttcaccatgttggtcaggctggtctcgaactgctgacctcgtgatccgcccgcctcgg

SEQ ID NO: 111578 - DNA, 80 bp, synthetic construct
  source 1..80: mol_type = other DNA
tggagaacacattcctcctggggagactgacagatgcaaagacaggaacaagccagggtcatgttggcgccggaagagcc

SEQ ID NO: 111579 - DNA, 80 bp, synthetic construct; identical to SEQ ID NO: 21905
  source 1..80: mol_type = other DNA

SEQ ID NO: 111580 - DNA, 80 bp, synthetic construct
  source 1..80: mol_type = other DNA
tcctggctaattttttttttagtagagacgggggtttcgtcattttggccaggctggtctcgaactcctgacctcagatg

SEQ ID NO: 111581 - DNA, 80 bp, synthetic construct
  source 1..80: mol_type = other DNA
atctccgactccctggttcaagcgattctcctgcctcagcctcccaagtaactgggattacaggcacgcactaccattcc

SEQ ID NO: 111582 - DNA, 80 bp, synthetic construct
  source 1..80: mol_type = other DNA
aaagtttttaagcagggacatgacattgtcagatttatatactgaaaagctcacccaggttgccaagtggtttggagggg

SEQ ID NO: 111583 - DNA, 80 bp, synthetic construct; identical to SEQ ID NO: 21906
  source 1..80: mol_type = other DNA

SEQ ID NO: 111584 - DNA, 80 bp, synthetic construct
  source 1..80: mol_type = other DNA
aattgtatgaattttgtattttactccaaaatttttctgtgcccgatttaatataaaaatttactgagcctgggtgcagt

SEQ ID NO: 111585 - DNA, 80 bp, synthetic construct
  source 1..80: mol_type = other DNA
tgggaagctgaggcaggaagatcacccgaacccaggagttggaggctacagtgaactatgatggtgcctctgaatagttg

SEQ ID NO: 111586 - DNA, 80 bp, synthetic construct
  source 1..80: mol_type = other DNA
agcagtcctcccagagcttcagcttcccaaagtagctgggactataggcatgctccactatgtctggctaatttcttttt

SEQ ID NO: 111587 - DNA, 80 bp, synthetic construct; identical to SEQ ID NO: 21907
  source 1..80: mol_type = other DNA

SEQ ID NO: 111588 - DNA, 80 bp, synthetic construct
  source 1..80: mol_type = other DNA
tgcttgaacctgggaggcggaggtggcagtgagccaagatcacaccactacactccagcctgggcaacagagcaagactc

SEQ ID NO: 111589 - DNA, 80 bp, synthetic construct
  source 1..80: mol_type = other DNA
cttaaacagaatcttagggctggaggattgcttcctgccctcttttgtttgtgatgtatgcattttgaaaattctgggcc

SEQ ID NO: 111590 - DNA, 80 bp, synthetic construct
  source 1..80: mol_type = other DNA
cccagctatttgggaggctgtggcaggagaatggcataaacctgggaggcggagcttgcagtgagccgagatcgtgccac

SEQ ID NO: 111591 - DNA, 80 bp, synthetic construct; identical to SEQ ID NO: 21908
  source 1..80: mol_type = other DNA

SEQ ID NO: 111592 - DNA, 80 bp, synthetic construct
  source 1..80: mol_type = other DNA
actagaagggctttgtataatatttaagcagagtgagaggtaagctttttgtgtaggtcaggggaaatggagaaaatagg

SEQ ID NO: 111593 - DNA, 80 bp, synthetic construct
  source 1..80: mol_type = other DNA
ggactacaggcgctcgccaccacacctggctaatttttttgtatttttagtagagacgaggtttcaccacgttagccagg

SEQ ID NO: 111594 - DNA, 80 bp, synthetic construct
  source 1..80: mol_type = other DNA
cgatgggcttctggttaaccaaactgaattatttgtgccatctctcaatgttgacggacagcctatttttgccaatatca

SEQ ID NO: 111595 - DNA, 80 bp, synthetic construct; identical to SEQ ID NO: 21909
  source 1..80: mol_type = other DNA

SEQ ID NO: 111596 - DNA, 80 bp, synthetic construct
  source 1..80: mol_type = other DNA
ttgagacagaatctcgctgtgttagctaggctggagtgcagtggcgcaatctcggctcactgcaacctccgcctactggg

SEQ ID NO: 111597 - DNA, 80 bp, synthetic construct
  source 1..80: mol_type = other DNA
cagcacctggcctatgtattttcaatttaacacaatcaagctcacagtgccaatcagaggtgttttttttttttttattt

SEQ ID NO: 111598 - DNA, 80 bp, synthetic construct
  source 1..80: mol_type = other DNA
ctaatttttgtatttttagtagagatgaggtttcaccatgttggccaggctgatcttgaactcctgacctcaggtgatct

SEQ ID NO: 111599 - DNA, 80 bp, synthetic construct; identical to SEQ ID NO: 21910
  source 1..80: mol_type = other DNA

SEQ ID NO: 111600 - DNA, 80 bp, synthetic construct
  source 1..80: mol_type = other DNA
cacagctatttgggaggcttaggtgggaggatcccttgagcccaggagtttgaggctgcagtgagccatgatcataccac

SEQ ID NO: 111601 - DNA, 80 bp, synthetic construct; identical to SEQ ID NO: 21911
  source 1..80: mol_type = other DNA

SEQ ID NO: 111602 - DNA, 80 bp, synthetic construct
  source 1..80: mol_type = other DNA
ctacgcccggctaattttttgtatttttagtagagacggggtttcaccgttttagccgggatggtctcgatctcctgacc

SEQ ID NO: 111603 - DNA, 80 bp, synthetic construct
  source 1..80: mol_type = other DNA
tcactgtgtcacccaggctggagtgcagtggcgtgtgatcttggctcactgcaacctctgcctctcgggttcaagcgatt

SEQ ID NO: 111604 - DNA, 80 bp, synthetic construct; identical to SEQ ID NO: 21912
  source 1..80: mol_type = other DNA

SEQ ID NO: 111605 - DNA, 80 bp, synthetic construct
  source 1..80: mol_type = other DNA
gctcaagtgatcctcccacctcagcctccccagtcgctgggaccacaggcatgtgccaccatgcctggctaattttttgt

SEQ ID NO: 111606 - DNA, 80 bp, synthetic construct
  source 1..80: mol_type = other DNA
tctctagcagggtagctcagggctttcaaaagtataaaagcagaagtcagcaggcctttttaaggcttcggcctagaatt

SEQ ID NO: 111607 - DNA, 80 bp, synthetic construct; identical to SEQ ID NO: 21913
  source 1..80: mol_type = other DNA

SEQ ID NO: 111608 - DNA, 80 bp, synthetic construct
  source 1..80: mol_type = other DNA
cacaggagcgcattgcacatcaacggatgggagattgaagatttctgttgaaacttacactgtttcatctcagcttttga

SEQ ID NO: 111609 - DNA, 80 bp, synthetic construct
  source 1..80: mol_type = other DNA
atgtaatttaatgcctgcccattagagaagtatttatcaggagaaggtggtggcatttttgcttcctagtaagtcaggac

SEQ ID NO: 111610 - DNA, 80 bp, synthetic construct
  source 1..80: mol_type = other DNA
ttttaagaaggcattggcatctgcttttaatggatgtataatacatccattctacatccgtagcggttggtgacttgtct

SEQ ID NO: 111611 - DNA, 80 bp, synthetic construct; identical to SEQ ID NO: 21914
  source 1..80: mol_type = other DNA

SEQ ID NO: 111612 - DNA, 80 bp, synthetic construct
  source 1..80: mol_type = other DNA
ccgcacagaaaatacgagaaaatctgcatgtttgattatagtattaatggacaaataagtttttgctaaatgtgagtatt

SEQ ID NO: 111613 - DNA, 80 bp, synthetic construct
  source 1..80: mol_type = other DNA
ggttcacgtaatcctcctgagtagctgggattacaggcgcctgccaccacgctggccaatttttgtacttttagtagaga

SEQ ID NO: 111614 - DNA, 80 bp, synthetic construct
  source 1..80: mol_type = other DNA
cagcctctggtcctaccaatggattcatggagtagcctggactgtttcatagttttctaaatgtacaaattcttataggc

SEQ ID NO: 111615 - DNA, 80 bp, synthetic construct
  source 1..80: mol_type = other DNA
ggaagaaaaaagatccctattagatacacttcttaaatacaatcacattaacattttgagctatttccttccagcctttt

SEQ ID NO: 111616 - DNA, 80 bp, synthetic construct; identical to SEQ ID NO: 21915
  source 1..80: mol_type = other DNA

SEQ ID NO: 111617 - DNA, 80 bp, synthetic construct
  source 1..80: mol_type = other DNA
gcacacatctgtaatcctagctacttggcaggctgaggtgagaagatcattggagtttaggaattggaggctgcagtgag

SEQ ID NO: 111618 - DNA, 80 bp, synthetic construct
  source 1..80: mol_type = other DNA
aggagttcgagaccagcctggccaacatggtaaaaccccatttctactaaaaaatacaagaattagctgggtgtggtggc

SEQ ID NO: 111619 - DNA, 80 bp, synthetic construct; identical to SEQ ID NO: 21916
  source 1..80: mol_type = other DNA

SEQ ID NO: 111620 - DNA, 80 bp, synthetic construct
  source 1..80: mol_type = other DNA
gagtagctgggattacaggcgcctgccaccatgcctggctaattttgtgtttttagtggagacggggtttcaccatgttg

SEQ ID NO: 111621 - DNA, 80 bp, synthetic construct
  source 1..80: mol_type = other DNA
tattttttttaagctgtctttgtgtcaaaatgatagttcatgctcctcttgttaaaacctgcaggccgagcacagtggct

SEQ ID NO: 111622 - DNA, 80 bp, synthetic construct
  source 1..80: mol_type = other DNA
aggcctaggcgggtggatcacgaggtcaggaaatcgagaccatcctggctaacacgggtgaaaccccgtctctattaaaa

SEQ ID NO: 111623 - DNA, 80 bp, synthetic construct; identical to SEQ ID NO: 21917
  source 1..80: mol_type = other DNA

SEQ ID NO: 111624 - DNA, 80 bp, synthetic construct
  source 1..80: mol_type = other DNA
acctgtagcatgaataatgtttgtttttcatttcgaatcttgtgaatgtattaaatatatcgctcttaagagacggtgaa

SEQ ID NO: 111625 - DNA, 80 bp, synthetic construct; identical to SEQ ID NO: 21918
  source 1..80: mol_type = other DNA

SEQ ID NO: 111626 - DNA, 80 bp, synthetic construct
  source 1..80: mol_type = other DNA
ggatttcctcacccagtaagtctcatttttttcacatatacttgtagacccaaaggtccttaagttacttaaaaacagtc

SEQ ID NO: 111627 - DNA, 80 bp, synthetic construct
  source 1..80: mol_type = other DNA
atggtttttatacactaaggacactcccagtgatgaaaatgaattcccctccatttgtgcaaggaggtatgtacatctat

SEQ ID NO: 111628 - DNA, 80 bp, synthetic construct; identical to SEQ ID NO: 21919
  source 1..80: mol_type = other DNA

SEQ ID NO: 111629 - DNA, 80 bp, synthetic construct
  source 1..80: mol_type = other DNA
caataattccatccccagcgaaaacgagcataaaaaaagaagggaagggtcagggggacatgatcagctatggctcttct

SEQ ID NO: 111630 - DNA, 80 bp, synthetic construct
  source 1..80: mol_type = other DNA
gaagttggatgaagaagatcaactgaagtttcctttttagtgaggaggagtggagagtcagacttgaaagcagttcacac

SEQ ID NO: 111631 - DNA, 80 bp, synthetic construct
  source 1..80: mol_type = other DNA
ttcacctgttgacacaattgccagtcagagacacttgcaacaaagagacaggcacaagttcaactatcaaggcccgagtg

SEQ ID NO: 111632 - DNA, 80 bp, synthetic construct; identical to SEQ ID NO: 21920
  source 1..80: mol_type = other DNA

SEQ ID NO: 111633 - DNA, 80 bp, synthetic construct
  source 1..80: mol_type = other DNA
cacttctatctgtgtagataccctggatgggctggatactttaaaataaatcactgataccagtttacatgttatgtgtt

SEQ ID NO: 111634 - DNA, 80 bp, synthetic construct
  source 1..80: mol_type = other DNA
agggagaataactaccatttatttgatgcttaacatatgccaagccttgtgctgggcttcacacacgcacacacacaacc

SEQ ID NO: 111635 - DNA, 80 bp, synthetic construct
  source 1..80: mol_type = other DNA
agccatgatggaaaagcagctgcagctccatcttaaggaagaatgcacagaagctaaaccctgtgccacctgacggatct

SEQ ID NO: 111636 - DNA, 80 bp, synthetic construct; identical to SEQ ID NO: 21921
  source 1..80: mol_type = other DNA

SEQ ID NO: 111637 - DNA, 80 bp, synthetic construct
  source 1..80: mol_type = other DNA
tcttcctggcctggctctcactctccaaccccacctccagcagtgctgttaagggctggctcctaatggactaatcccaa

SEQ ID NO: 111638 - DNA, 80 bp, synthetic construct
  source 1..80: mol_type = other DNA
acagaactggatttgctccttactagctttgtgactttagataagccattgaattattattgcctcagtctcctcatctg

SEQ ID NO: 111639 - DNA, 80 bp, synthetic construct
  source 1..80: mol_type = other DNA
acctcagcctcccccaaatagctgggactataggtccacaccaccatgcccagctagtttttgtattttttgtagagaca

SEQ ID NO: 111640 - DNA, 80 bp, synthetic construct; identical to SEQ ID NO: 21922
  source 1..80: mol_type = other DNA

SEQ ID NO: 111641 - DNA, 80 bp, synthetic construct
  source 1..80: mol_type = other DNA
ctgatactggtccagcagaaaccaagaccgctcctggtgcattaacttttaacagagcaaggactcagttctctgaaaat

SEQ ID NO: 111642 - DNA, 80 bp, synthetic construct
  source 1..80: mol_type = other DNA
ctgcacactccagccattcttttcccatctttctccttctctgtatttccaccctccccttctttaaaaaatgttattat

SEQ ID NO: 111643 - DNA, 80 bp, synthetic construct; identical to SEQ ID NO: 21923
  source 1..80: mol_type = other DNA

SEQ ID NO: 111644 - DNA, 80 bp, synthetic construct
  source 1..80: mol_type = other DNA
aatgtctgcatctgcctcacccttagatttccccagtcccccaggcccaacaagaatcactgattctgcacagtaatctt

SEQ ID NO: 111645 - DNA, 80 bp, synthetic construct
  source 1..80: mol_type = other DNA
gtgtcagagacaggaaaagtgaatcacacgctacaaattggattccgctctccatcaccctcattctttgctgatgctca

SEQ ID NO: 111646 - DNA, 80 bp, synthetic construct
  source 1..80: mol_type = other DNA
tctcattcatattcaacaacaaagagaatcatgaaatcaaccctagcccaagggaacacagctgccagcaatgagaagtg

SEQ ID NO: 111647 - DNA, 80 bp, synthetic construct
  source 1..80: mol_type = other DNA
ctatttgaaaatgatactggaaaaggggatctcattaaaggcaacctctcctactaggactgaacagatcccaaaatgcc

SEQ ID NO: 111648 - DNA, 80 bp, synthetic construct; identical to SEQ ID NO: 21924
  source 1..80: mol_type = other DNA

SEQ ID NO: 111649 - DNA, 80 bp, synthetic construct
  source 1..80: mol_type = other DNA
ctccttgttcttgcatcaagcaaatatgactccatggttgtgagaccctcaaaacacaccaaaagcactgagaaagtttt

SEQ ID NO: 111650 - DNA, 80 bp, synthetic construct
  source 1..80: mol_type = other DNA
gagaatcctgagtcacaggcatctgggatggaaacaagccattctagaatcagtcaggtctttctgttgcaaaggcagcc

SEQ ID NO: 111651 - DNA, 80 bp, synthetic construct; identical to SEQ ID NO: 21925
  source 1..80: mol_type = other DNA

SEQ ID NO: 111652 - DNA, 80 bp, synthetic construct
  source 1..80: mol_type = other DNA
ctcgaaaccgtgggcacaagcaatcctcctacctcagcctcctgagtagctgggactacaggcatacaccagcacacttg

SEQ ID NO: 111653 - DNA, 80 bp, synthetic construct
  source 1..80: mol_type = other DNA
ggttggtgccttatgtttcacctctgtgagctggagaagatgttacccctattgagtctgatttccttcccctgcctttg

SEQ ID NO: 111654 - DNA, 80 bp, synthetic construct
  source 1..80: mol_type = other DNA
gtactctctcagtcacttttcatttctttatatcctagctcccaaacaaaccaggaactctttgagaaggaggattataa

SEQ ID NO: 111655 - DNA, 80 bp, synthetic construct; identical to SEQ ID NO: 21926
  source 1..80: mol_type = other DNA

SEQ ID NO: 111656 - DNA, 80 bp, synthetic construct
  source 1..80: mol_type = other DNA
attgccttcatttattcccttgcatttttcaggcaggactttactttctcgttttccttataaccttgacagtcactttt

SEQ ID NO: 111657 - DNA, 80 bp, synthetic construct
  source 1..80: mol_type = other DNA
atctgaatgcagctcacttttttctccagcttcccaagagcaaaatcagcagtaataacacagttgcaacagtgatccta

SEQ ID NO: 111658 - DNA, 80 bp, synthetic construct
  source 1..80: mol_type = other DNA
atgccagttctctgtttcccagaagcagcctctctgacctgggggaaaatccagtttcattggcgtatcttcaaagataa

SEQ ID NO: 111659 - DNA, 80 bp, synthetic construct
  source 1..80: mol_type = other DNA
ccacacccggctcatttttgtatttttagtagagacggggtttcaccttgttggccaggctggtctccaactcctgacct

SEQ ID NO: 111660 - DNA, 80 bp, synthetic construct; identical to SEQ ID NO: 21927
  source 1..80: mol_type = other DNA

SEQ ID NO: 111661 - DNA, 80 bp, synthetic construct
  source 1..80: mol_type = other DNA
cagtttactgacctctgtaataaaggatagataatcagaatgcaaaatggccccacagcctctttacaacacctggatca

SEQ ID NO: 111662 - DNA, 80 bp, synthetic construct
  source 1..80: mol_type = other DNA
ttaaaatatctcttattgcagcctgggtaagcacacatgaaggggcgtttctcactggtctcagatgccgaccgtacaag

SEQ ID NO: 111663 - DNA, 80 bp, synthetic construct
  source 1..80: mol_type = other DNA
ccattcacactccagatccccatggcagacatcagtaatggatgctagatcaggacattctacaatgcagtgctctaaga

SEQ ID NO: 111664 - DNA, 80 bp, synthetic construct; identical to SEQ ID NO: 21928
  source 1..80: mol_type = other DNA

SEQ ID NO: 111665 - DNA, 80 bp, synthetic construct
  source 1..80: mol_type = other DNA
cttattagaaaaaagtgggataatgaatgagcccctaactgaccagatcgtccaagtataagtaaataacaaggaagaag

SEQ ID NO: 111666 - DNA, 80 bp, synthetic construct
  source 1..80: mol_type = other DNA
ctttatcttgtggaagtgcagtgtgtgtgttgtcagtcttccaagaataagaactggaggaaaacaaagaggcaagctcc

SEQ ID NO: 111667 - DNA, 80 bp, synthetic construct
  source 1..80: mol_type = other DNA
ttatagatgagtaaatcaaccccaaaggcggtgagatgctgacacaagagtgcatccatgttttggttttgtttgttctt

SEQ ID NO: 111668 - DNA, 80 bp, synthetic construct
  source 1..80: mol_type = other DNA
tttttggtagagatagggtctccctatgttgctcaggctggtctcaaactcttgagctgaagggatccttccaccttggc

SEQ ID NO: 111669 - DNA, 80 bp, synthetic construct; identical to SEQ ID NO: 21929
  source 1..80: mol_type = other DNA

SEQ ID NO: 111670 - DNA, 80 bp, synthetic construct
  source 1..80: mol_type = other DNA
tccatttcccttaattcatcctagaagcagtgcacatgggaacaggagttgttaatctcagtaagggtcccggtgaagga

SEQ ID NO: 111671 - DNA, 80 bp, synthetic construct
  source 1..80: mol_type = other DNA
aacatctcagagctacttgccccacgtatcatgtggggtctggcccagatacaacttatatctagagtactgaccattct

SEQ ID NO: 111672 - DNA, 80 bp, synthetic construct
  source 1..80: mol_type = other DNA
tctattgaattctccaaaacttttacctttatactttactttcttcatgctccttggagacttctccctcccacaaactg

SEQ ID NO: 111673 - DNA, 80 bp, synthetic construct; identical to SEQ ID NO: 21930
  source 1..80: mol_type = other DNA

SEQ ID NO: 111674 - DNA, 80 bp, synthetic construct
  source 1..80: mol_type = other DNA
tcaccaggtcaggagatcaagaccatcctggctaacactgtgaaaccccgtctctactaaaaatacaaaaaattagccag

SEQ ID NO: 111675 - DNA, 80 bp, synthetic construct
  source 1..80: mol_type = other DNA
aagaaaaaaaaaagaccggtgattattgggaagagaagaagagggagggaagaacaggtggagtgtagggaattttaagg

SEQ ID NO: 111676 - DNA, 80 bp, synthetic construct
  source 1..80: mol_type = other DNA
tgtaccacatcaatacaaaatggtactaatagggtaaagtccatttttctaaagtccatgtataaagcttagcacaatgc

SEQ ID NO: 111677 - DNA, 80 bp, synthetic construct; identical to SEQ ID NO: 21931
  source 1..80: mol_type = other DNA

SEQ ID NO: 111678 - DNA, 80 bp, synthetic construct
  source 1..80: mol_type = other DNA
ggccaaagagtccatcagtaaggaactaaagggccggtaagtaggaagaggcagtgcggcccccttcccgctggggcctg

SEQ ID NO: 111679 - DNA, 80 bp, synthetic construct
  source 1..80: mol_type = other DNA
ttggaaatgcttatctgcaatcaggagggaatgatggtttttaaagctcacagaacaaaaatagttggtttttgcctccc

SEQ ID NO: 111680 - DNA, 80 bp, synthetic construct; identical to SEQ ID NO: 21932
  source 1..80: mol_type = other DNA

SEQ ID NO: 111681 - DNA, 80 bp, synthetic construct
  source 1..80: mol_type = other DNA
cccctaactggtgctcaggttaagcttcgactacataggaagagctgaaagatgtgcaatgctgaaaaggacaacttgaa

SEQ ID NO: 111682 - DNA, 80 bp, synthetic construct
  source 1..80: mol_type = other DNA
agcacattagaattacacctagaagcaccgaggagagctcttatgaaatagctctgtgaaatgatgcagctgctttgcaa

SEQ ID NO: 111683 - DNA, 80 bp, synthetic construct
  source 1..80: mol_type = other DNA
tcaacccaaatgtccatcaactgatgaatagataaatcaaagagagtatcttcatacaatggaatattattcagcaatga

SEQ ID NO: 111684 - DNA, 80 bp, synthetic construct; identical to SEQ ID NO: 21933
  source 1..80: mol_type = other DNA

SEQ ID NO: 111685 - DNA, 80 bp, synthetic construct
  source 1..80: mol_type = other DNA
ttatcacccaggctggagtgcagtggtgcgatcttggctcactgcaaccaccgcccctgggttcaaatgattctcctgcc

SEQ ID NO: 111686 - DNA, 80 bp, synthetic construct
  source 1..80: mol_type = other DNA
aaagcctccaggtgggattaaactggctgtcagcactgagaattccattctctgcctccattactctaacagttggttcc

SEQ ID NO: 111687 - DNA, 80 bp, synthetic construct
  source 1..80: mol_type = other DNA
ccctagggccacagaagctgtagggtttcacatttacttctggctctaagcattttagaaagaactgcctgcccctctaa

SEQ ID NO: 111688 - DNA, 80 bp, synthetic construct; identical to SEQ ID NO: 21934
  source 1..80: mol_type = other DNA

SEQ ID NO: 111689 - DNA, 80 bp, synthetic construct
  source 1..80: mol_type = other DNA
atgtgacttacacattttctttctttttcttttttagagcttgctctattgcccaggctggaatgtagtggtgcgatcat

SEQ ID NO: 111690 - DNA, 80 bp, synthetic construct
  source 1..80: mol_type = other DNA
tcctgggctcaagtgattctcccaccttggcctcccaaagtgccaggatcacaggagtgagccactgcccctggcctact

SEQ ID NO: 111691 - DNA, 80 bp, synthetic construct
  source 1..80: mol_type = other DNA
tctcatgaaattaagtggtgtgacactcaaagggaacagcaatttgcacagctggatgcaaaccacaaacaaaagaagca

SEQ ID NO: 111692 - DNA, 80 bp, synthetic construct; identical to SEQ ID NO: 21935
  source 1..80: mol_type = other DNA

SEQ ID NO: 111693 - DNA, 80 bp, synthetic construct
  source 1..80: mol_type = other DNA
caacatgactggtgactagttttcaagatagcccattccattttaggagagctttaaaaacaagctgaaatctgtcttct

SEQ ID NO: 111694 - DNA, 80 bp, synthetic construct
  source 1..80: mol_type = other DNA
cttctgagtagctgggaatgcaggcacccgccaccacgcccggctaatttttttgtagttttagtagagacggggtttca

SEQ ID NO: 111695 - DNA, 80 bp, synthetic construct
  source 1..80: mol_type = other DNA
cagccatctgtgtgtatctcctctgccccattgtaaacttggccttgaatacaaagactctctgctcttctctgcatcct

SEQ ID NO: 111696 - DNA, 80 bp, synthetic construct
  source 1..80: mol_type = other DNA
tggcacgtgcctctaatcctatctgcttgggaggctgaggcaggagaatcgcttgaacccgggaggcggagttgcagtga

SEQ ID NO: 111697 - DNA, 80 bp, synthetic construct; identical to SEQ ID NO: 21936
  source 1..80: mol_type = other DNA

SEQ ID NO: 111698 - DNA, 80 bp, synthetic construct
  source 1..80: mol_type = other DNA
tcctttggttttattgttcaaccaagcacaaatcatccatttaagcatttagtccatcatcccctaccttgtccacaagg

SEQ ID NO: 111699 - DNA, 80 bp, synthetic construct
  source 1..80: mol_type = other DNA
ttctcaaagatctggcctaataacttttccaagaattcatgctaactctgtggtttccagaatccactgggtttttttcc

SEQ ID NO: 111700 - DNA, 80 bp, synthetic construct; identical to SEQ ID NO: 21937
  source 1..80: mol_type = other DNA

SEQ ID NO: 111701 - DNA, 80 bp, synthetic construct
  source 1..80: mol_type = other DNA
taagttcttgcgaataattgaaattttaaagaatcactgtcgggtcaaataaaacacacactctagatggcaccactgca

SEQ ID NO: 111702 - DNA, 80 bp, synthetic construct
  source 1..80: mol_type = other DNA
ttttcaatccttagaaccctaggagtcattcattaagttccatcaccttacacaaatgacaacttcctccctggcctcag

SEQ ID NO: 111703 - DNA, 80 bp, synthetic construct
  source 1..80: mol_type = other DNA
atccccattttacagcaaagaatactgaggtttaaggagacattgcgttatttgcccacagtcagatggcaagtggcaga

SEQ ID NO: 111704 - DNA, 80 bp, synthetic construct; identical to SEQ ID NO: 21938
  source 1..80: mol_type = other DNA

SEQ ID NO: 111705 - DNA, 80 bp, synthetic construct
  source 1..80: mol_type = other DNA
acagaccaggggtggggtggaggtgggggtggttttgggatgaaattgttccacctcagatcgtcaggcattagttagat

SEQ ID NO: 111706 - DNA, 80 bp, synthetic construct
  source 1..80: mol_type = other DNA
cctcgcctgccgctcacctcctgctgcaaggaccaattcctaactggccacagaccactaccggtccatggcccgggggt

SEQ ID NO: 111707 - DNA, 80 bp, synthetic construct
  source 1..80: mol_type = other DNA
ctttggcgcttcacttctggcagtggcctggactgtacattttgctaaacagctttaagatgcataaaaatgtatcctga

SEQ ID NO: 111708 - DNA, 80 bp, synthetic construct
  source 1..80: mol_type = other DNA
ccaaaaatacaaaaattagccgggtggggtggtgggcgcctgtaatcccagctacttgggaggctgagtcgagagaatcg

SEQ ID NO: 111709 - DNA, 80 bp, synthetic construct; identical to SEQ ID NO: 21939
  source 1..80: mol_type = other DNA

SEQ ID NO: 111710 - DNA, 80 bp, synthetic construct
  source 1..80: mol_type = other DNA
aaaagagagaaaagaaaaagagcctttggaaggcaattagcattcatatgaatattcaaaaagggggaatttcggcctgt

SEQ ID NO: 111711 - DNA, 80 bp, synthetic construct
  source 1..80: mol_type = other DNA
tctctccccaccctcgatactcagggctcatacgtgagatgctgaaatgcctgattcttttcagtgttgacaataaaccc

SEQ ID NO: 111712 - DNA, 80 bp, synthetic construct; identical to SEQ ID NO: 21940
  source 1..80: mol_type = other DNA

SEQ ID NO: 111713 - DNA, 80 bp, synthetic construct
  source 1..80: mol_type = other DNA
atcgcttgaaccagggagtcggaagttgcagtgagccgagatcgcatcagcctggctacagagtgaaactccatctcaga

SEQ ID NO: 111714 - DNA, 80 bp, synthetic construct
  source 1..80: mol_type = other DNA
tgtcgtggcgggcacctgtagtcccagctacttgggaggctgaagcaggagaatcacttgaacccaggaggtggaggttg

SEQ ID NO: 111715 - DNA, 80 bp, synthetic construct
  source 1..80: mol_type = other DNA
gagaaagaacagaaaaaaagaaacacaggggagagaggaccaagtttaaaagactgtaagataaaacaatctgccaaatc

SEQ ID NO: 111716 - DNA, 80 bp, synthetic construct
  source 1..80: mol_type = other DNA
aaatactgtactctgtacttactgtgtactcgtatgaaccacagattgctggacttgaattaatcagccctaagagactt

SEQ ID NO: 111717 - DNA, 80 bp, synthetic construct; identical to SEQ ID NO: 21941
  source 1..80: mol_type = other DNA

SEQ ID NO: 111718 - DNA, 80 bp, synthetic construct
  source 1..80: mol_type = other DNA
tattttaaaatgcttgggatgggaaaagtctaagcatgatcgaaaagtcaaaaacttgaaactgtaagacaaaaacttac

SEQ ID NO: 111719 - DNA, 80 bp, synthetic construct
  source 1..80: mol_type = other DNA
gttgcccaggctggagtgcagtggcatcatcatagctcactgcagcctcaaactcctgggcccaagcactcctcccacct

SEQ ID NO: 111720 - DNA, 80 bp, synthetic construct; identical to SEQ ID NO: 21942
  source 1..80: mol_type = other DNA

SEQ ID NO: 111721 - DNA, 80 bp, synthetic construct
  source 1..80: mol_type = other DNA
ggagtgcagtggcacgatctcggctcactgcaacctccgcctcctgggttcaagcaattaattctcttgcctcagcctcc

SEQ ID NO: 111722 - DNA, 80 bp, synthetic construct
  source 1..80: mol_type = other DNA
gccaccatgcctgccccattttttcctcctcttgatcattctcatcagcaaacaaacatacagatacttctatctaaaga

SEQ ID NO: 111723 - DNA, 80 bp, synthetic construct
  source 1..80: mol_type = other DNA
catgatctttacctcctctccttgtctcttaaatccatctgtttcaggcttttgtctcttccgtctaatatatttagagg

SEQ ID NO: 111724 - DNA, 80 bp, synthetic construct
  source 1..80: mol_type = other DNA
aaaaatgataagcctgtgtgacttttataatcaaggagaaaataactgttttcattttagataaagtcgccatctaggca

SEQ ID NO: 111725 - DNA, 80 bp, synthetic construct; identical to SEQ ID NO: 21943
  source 1..80: mol_type = other DNA

SEQ ID NO: 111726 - DNA, 80 bp, synthetic construct
  source 1..80: mol_type = other DNA
tacaatcactgtttctcatttccaacttggccccttctccatcccaacctttctttcctatctttcctattcagctcctt

SEQ ID NO: 111727 - DNA, 80 bp, synthetic construct
  source 1..80: mol_type = other DNA
agctatcatgacaacttcgtgatggcctataaatatgcatttgctgaattgaatctcacctgaagccaatcatttttgta

SEQ ID NO: 111728 - DNA, 80 bp, synthetic construct
  source 1..80: mol_type = other DNA
acttacataataaaaaaattcaatacattcatcaaatgcatgtccaaaaataaaaggatagaaaaggccaacagccaggg

SEQ ID NO: 111729 - DNA, 80 bp, synthetic construct; identical to SEQ ID NO: 21944
  source 1..80: mol_type = other DNA

SEQ ID NO: 111730 - DNA, 80 bp, synthetic construct
  source 1..80: mol_type = other DNA
ttgcatctcaggctccgggagccacttaaaagcaagctatctatttccaagaagtaaatctcttggacggataccttatg

SEQ ID NO: 111731 - DNA, 80 bp, synthetic construct
  source 1..80: mol_type = other DNA
ttttcaccacacatcactcattgttgagtcttttttgtttttcctctcaagcatccacaggttgaatactgtgtgttccc

SEQ ID NO: 111732 - DNA, 80 bp, synthetic construct; identical to SEQ ID NO: 21945
  source 1..80: mol_type = other DNA

SEQ ID NO: 111733 - DNA, 80 bp, synthetic construct
  source 1..80: mol_type = other DNA
gttttctcccagggacccactttaaaaatctaatttcatttgtttgggggtgagggagaagaaagtactttccgtaaagt

SEQ ID NO: 111734 - DNA, 80 bp, synthetic construct
  source 1..80: mol_type = other DNA
ggttcagtcacacaagtatatcccacctctaacacagcaagttttcatttcatctgcccatgttctttataaaatcctat

SEQ ID NO: 111735 - DNA, 80 bp, synthetic construct
  source 1..80: mol_type = other DNA
caaggaaagaagacccgaaccagcatttagtggggtttagtctgaggtgcatgatcttttaataaaaaattgataatgcc

SEQ ID NO: 111736 - DNA, 80 bp, synthetic construct
  source 1..80: mol_type = other DNA
gtgtctgaatttgtcttcatggaataccttttctcaaatgtattctccatattaatacttttcataccatggcaaaagaa

SEQ ID NO: 111737 - DNA, 80 bp, synthetic construct; identical to SEQ ID NO: 21946
  source 1..80: mol_type = other DNA

SEQ ID NO: 111738 - DNA, 80 bp, synthetic construct
  source 1..80: mol_type = other DNA
gtaaagggtatttctaactgtggtcacagtctaaaaggtttccacccatttaagaagctctaatctagggcccaggtcct

SEQ ID NO: 111739 - DNA, 80 bp, synthetic construct
  source 1..80: mol_type = other DNA
gcccctcacacggcacccaatactgtttatatacatccttagataaatgtccagttcacaaaatggaagcggaaattcgt

SEQ ID NO: 111740 - DNA, 80 bp, synthetic construct; identical to SEQ ID NO: 21947
  source 1..80: mol_type = other DNA

SEQ ID NO: 111741 - DNA, 80 bp, synthetic construct
  source 1..80: mol_type = other DNA
aaactcctgagctcaagtgatccacccacctcagcctcccaaagtgctgggattataggcgtgagccaccatgccaggcc

SEQ ID NO: 111742 - DNA, 80 bp, synthetic construct
  source 1..80: mol_type = other DNA
tggtggcagatgcctgtaatcccagctactcaggaggctgaggcaggagaatcacttgaacccaggaggcagaggttcca

SEQ ID NO: 111743 - DNA, 80 bp, synthetic construct
  source 1..80: mol_type = other DNA
ttgaacagaacaaattgttcacactttgtgcttcatccttataatacagcttctgcctcctcagcaagtgactaacagta

SEQ ID NO: 111744 - DNA, 80 bp, synthetic construct; identical to SEQ ID NO: 21948
  source 1..80: mol_type = other DNA

SEQ ID NO: 111745 - DNA, 80 bp, synthetic construct
  source 1..80: mol_type = other DNA
actgaccaacatggagaaaccccatctctactaaaaatacaaaattagccgggcgtggtggcacatgcctgtaatcccag

SEQ ID NO: 111746 - DNA, 80 bp, synthetic construct
  source 1..80: mol_type = other DNA
aaagagaatgggtagaaagacagaatgctaaaactgtcagcagtcccccagatggaagacaggagagaaataatttaaaa

SEQ ID NO: 111747 - DNA, 80 bp, synthetic construct
  source 1..80: mol_type = other DNA
gtgaggtgaagaacctaacagtaagtcttggaagatgaaatacaactctgttgattactgaaggatgaaccaaataacag

SEQ ID NO: 111748 - DNA, 80 bp, synthetic construct
  source 1..80: mol_type = other DNA
aaaaacaagtcttttcaaagcctggcctcagacttagggtaagttctccctgagagatttaaaggtaaataaagaagaag

SEQ ID NO: 111749 - DNA, 80 bp, synthetic construct; identical to SEQ ID NO: 21949
  source 1..80: mol_type = other DNA

SEQ ID NO: 111750 - DNA, 80 bp, synthetic construct
  source 1..80: mol_type = other DNA
ctgcccttctgtccatttcactgagctggagctcccagcagcaactctagaaaagaagaagaggtggggagtggggaatg

SEQ ID NO: 111751 - DNA, 80 bp, synthetic construct
  source 1..80: mol_type = other DNA
gcttgggctttggaatcagatctggacttggcatcccagctctagcacttagtaggatgtgaacctgggaagtaacttaa

SEQ ID NO: 111752 - DNA, 80 bp, synthetic construct; identical to SEQ ID NO: 21950
  source 1..80: mol_type = other DNA

SEQ ID NO: 111753 - DNA, 80 bp, synthetic construct
  source 1..80: mol_type = other DNA
gatcagcatcacacaaatacaaatttggatcccggactttgcacacccaaagcacttcttgataagatagtggaatggtt

SEQ ID NO: 111754 - DNA, 80 bp, synthetic construct
  source 1..80: mol_type = other DNA
aacaacccacatttatgtttttgaaaatttaatactgaacacaactcaccaactaggggaaggaggaaagcgttctaatg

SEQ ID NO: 111755 - DNA, 80 bp, synthetic construct
  source 1..80: mol_type = other DNA
acccctttaaggtggctcctaagttcatctgattccaggtcatgcattcaagctgggatgtcatttggtataaattgtca

SEQ ID NO: 111756 - DNA, 80 bp, synthetic construct
  source 1..80: mol_type = other DNA
ctgatctctgcacagttatacacttcatacacagcagaagggatgtgagagtaactcagaagcattttttaaaacctttg

SEQ ID NO: 111757 - DNA, 80 bp, synthetic construct; identical to SEQ ID NO: 21951
  source 1..80: mol_type = other DNA

SEQ ID NO: 111758 - DNA, 80 bp, synthetic construct
  source 1..80: mol_type = other DNA
ctatgtaaaccaacaaaaagctgttctgtcccctctgtatttatctcattcctagaaaattagcacatgaatcaattgcc

SEQ ID NO: 111759 - DNA, 80 bp, synthetic construct
  source 1..80: mol_type = other DNA
aatgaaaaaagataagaggcatttaatatccgatgtgtggtatcagattgcagatataggaccatctctgtctggtcatg

SEQ ID NO: 111760 - DNA, 80 bp, synthetic construct; identical to SEQ ID NO: 21952
  source 1..80: mol_type = other DNA

SEQ ID NO: 111761 - DNA, 80 bp, synthetic construct
  source 1..80: mol_type = other DNA
aatgaaaaaaaatgatgagtttctcctgcagcttccctgtttgtagcagcagcccgtactggtctgtgccacaacatttt

SEQ ID NO: 111762 - DNA, 80 bp, synthetic construct
  source 1..80: mol_type = other DNA
tactggtttttgttctcctgcgccttttcatcaagcaatccatttattaatcttaccattaatctcagccaacaggcatt

SEQ ID NO: 111763 - DNA, 80 bp, synthetic construct
  source 1..80: mol_type = other DNA
tcaagagaactgggaaagaaagatgagtgacagacgctgatgcagaagggtgaatgaatcccaaatatctaactttatga

SEQ ID NO: 111764 - DNA, 80 bp, synthetic construct
  source 1..80: mol_type = other DNA
cctcagtctcccatgcgcaagcaattctcctgcctcagccacccaagtagctgggactacaggcatctgccaccatgccc

SEQ ID NO: 111765 - DNA, 80 bp, synthetic construct; identical to SEQ ID NO: 21953
  source 1..80: mol_type = other DNA

SEQ ID NO: 111766 - DNA, 80 bp, synthetic construct
  source 1..80: mol_type = other DNA
tgtgttatgtttctattggacagtgatgttctataagttttgggacattgagcaaatcagttcagctccctgcccctcag

SEQ ID NO: 111767 - DNA, 80 bp, synthetic construct
  source 1..80: mol_type = other DNA
agcactttcacacattctcaatactgctcacaactttgtgaggcagatgtaattctgagtccccatttattagatgaggg

SEQ ID NO: 111768 - DNA, 80 bp, synthetic construct; identical to SEQ ID NO: 21954
  source 1..80: mol_type = other DNA

SEQ ID NO: 111769 - DNA, 80 bp, synthetic construct
  source 1..80: mol_type = other DNA
ggactttcagaaaatccccaagctactaataggtttcctgaggccagagataggatcagagcacagttttaaccacatcc

SEQ ID NO: 111770 - DNA, 80 bp, synthetic construct
  source 1..80: mol_type = other DNA
tcatggaagcccatggaaagaggcagcttcgttcaaggaatatagagcctctggcaaatgaagcatctaattactcaata

SEQ ID NO: 111771 - DNA, 80 bp, synthetic construct
  source 1..80: mol_type = other DNA
caaaagtcatggtgtcctttatattttttaagtagattttttttaaagtcacttgtttcctatgtaagaatgtttgaagt

SEQ ID NO: 111772 - DNA, 80 bp, synthetic construct; identical to SEQ ID NO: 21955
  source 1..80: mol_type = other DNA

SEQ ID NO: 111773 - DNA, 80 bp, synthetic construct
  source 1..80: mol_type = other DNA
aagagctgcccccagaggataaaaaataaaaaggctcaaagtagacataactggcatctgtgattagaattcatgtttcc

SEQ ID NO: 111774 - DNA, 80 bp, synthetic construct
  source 1..80: mol_type = other DNA
gcccagcaggccataatgaataattatttcacagtcactctcttggtattgtaatttctctcaagctcaccagctaacca

SEQ ID NO: 111775 - DNA, 80 bp, synthetic construct
  source 1..80: mol_type = other DNA
gaccttccaccttctgcctatcattgcaggaaacaaatattgattttctactaagggaaaaggcagtgtacaatgtacat

SEQ ID NO: 111776 - DNA, 80 bp, synthetic construct
  source 1..80: mol_type = other DNA
tgaggaagtttctctcatatgaaaaataatctacttgtaacaggctccactgtcaatgtcaccatttgtgaatcatcaca

SEQ ID NO: 111777 - DNA, 80 bp, synthetic construct; identical to SEQ ID NO: 21956
  source 1..80: mol_type = other DNA

SEQ ID NO: 111778 - DNA, 80 bp, synthetic construct
  source 1..80: mol_type = other DNA
agctgccttttctaggtagaaattaggggggaaattgtgcctagtaaggttggaccccactactccctacactgacagaa

SEQ ID NO: 111779 - DNA, 80 bp, synthetic construct
  source 1..80: mol_type = other DNA
taaagacaaaactggaggagtctggagtttgaaagacaactgctctgtgtgttagaacttcaggagaatgctcaagcctg

SEQ ID NO: 111780 - DNA, 80 bp, synthetic construct
  source 1..80: mol_type = other DNA
gataactgacttctttcacaactgtgggaaataggagaccatccttgagtgagactgaggacagatgccaccttcacaaa

SEQ ID NO: 111781 - DNA, 80 bp, synthetic construct; identical to SEQ ID NO: 21957
  source 1..80: mol_type = other DNA

SEQ ID NO: 111782 - DNA, 80 bp, synthetic construct
  source 1..80: mol_type = other DNA
ggtggatcacaaggtcaggagtttgagaccatcctggctaacacggtgaaaccccctctctactaaaaatacaaaaaatt

SEQ ID NO: 111783 - DNA, 80 bp, synthetic construct
  source 1..80: mol_type = other DNA
aaaaaagtgatacattgcctatacaaggggagtaatcagatagggaatcctgcgtggtctggtgtcactcagtgattcag

SEQ ID NO: 111784 - DNA, 80 bp, synthetic construct; identical to SEQ ID NO: 21958
  source 1..80: mol_type = other DNA

SEQ ID NO: 111785 - DNA, 80 bp, synthetic construct
  source 1..80: mol_type = other DNA
atagagaaaaccacctcctgtcatttcccataagttgctgattgaatgtattttctattcactgttgttcatagccacaa

SEQ ID NO: 111786 - DNA, 80 bp, synthetic construct
  source 1..80: mol_type = other DNA
tgggattttgagaatgtcctcaaagcacactccacactgtattttgcttatttaatgtcagatctgtaccattacctttc

SEQ ID NO: 111787 - DNA, 80 bp, synthetic construct
  source 1..80: mol_type = other DNA
taaaaatacaaaaattagctgggcatggtggccagcacctataatctcagctacttgggaggctgaggcacaagaatcac

SEQ ID NO: 111788 - DNA, 80 bp, synthetic construct; identical to SEQ ID NO: 21959
  source 1..80: mol_type = other DNA

SEQ ID NO: 111789 - DNA, 80 bp, synthetic construct
  source 1..80: mol_type = other DNA
gcatttaaataccctttcaaacttgtttaggagtaggaaagagggaaaccatataactgtagtaatgttggtgcacagac

SEQ ID NO: 111790 - DNA, 80 bp, synthetic construct
  source 1..80: mol_type = other DNA
agcacaaattccaagggaacaaactcttcctacaggggtcacaaattcttttttgagatgttactacttgggaaattttc

SEQ ID NO: 111791 - DNA, 80 bp, synthetic construct
  source 1..80: mol_type = other DNA
gaaaacgtgaaaatttatgtgatgtttcctacttccctagcaaccacaaaatcagacctaagtcaaaatccaccataggc

SEQ ID NO: 111792 - DNA, 80 bp, synthetic construct
  source 1..80: mol_type = other DNA
ctgaggcaccagactgcaaggtcttccagtccccaacccccaagaacacctcccatatcgacagtgcccactcccgcatc

SEQ ID NO: 111793 - DNA, 80 bp, synthetic construct; identical to SEQ ID NO: 21960
  source 1..80: mol_type = other DNA

SEQ ID NO: 111794 - DNA, 80 bp, synthetic construct
  source 1..80: mol_type = other DNA
cctccacccgcccaaaaaaagtgtgatgaggaatccaagtttcgaatagataaaccggatgttccgggggaaaaaaagga

SEQ ID NO: 111795 - DNA, 80 bp, synthetic construct
  source 1..80: mol_type = other DNA
cgggactggacagtcccccaggcgcggccactcccccacccaatctcccagggcaggcgcttttccttccttcatgacct

SEQ ID NO: 111796 - DNA, 80 bp, synthetic construct; identical to SEQ ID NO: 21961
  source 1..80: mol_type = other DNA

SEQ ID NO: 111797 - DNA, 80 bp, synthetic construct
  source 1..80: mol_type = other DNA
ggccagagcagcctccccgcagggccctgttgcgacccgatctccgtcctgcaccccggccgggggcccaccccagagcg

SEQ ID NO: 111798 - DNA, 80 bp, synthetic construct
  source 1..80: mol_type = other DNA
accgagtgggagtggactccgtgtttaatatttagtcccgatgaaggtaaattcctcccagtaaagaccttctaaaaata

SEQ ID NO: 111799 - DNA, 80 bp, synthetic construct
  source 1..80: mol_type = other DNA
cgcagtcagggctgcccggctggggcgttcccaagtccgccggctcatgcgtcccctccggggtcccaaggacccagacg

SEQ ID NO: 111800 - DNA, 80 bp, synthetic construct
  source 1..80: mol_type = other DNA
cccaagggctcggggtgcgaggctgcgggcaggggttgggggagacacgagatcctgagcctggggcactggggcctgga

SEQ ID NO: 111801 - DNA, 80 bp, synthetic construct; identical to SEQ ID NO: 21962
  source 1..80: mol_type = other DNA

SEQ ID NO: 111802 - DNA, 80 bp, synthetic construct
  source 1..80: mol_type = other DNA
tgtgaccgtagctgggcgtcccgtcgaaggtgaccgtgctgtaacctgcgggagcggcggagagaagcacagtgtcagcg

SEQ ID NO: 111803 - DNA, 80 bp, synthetic construct
  source 1..80: mol_type = other DNA
acaggcttctccatccttttctgactaaaacccccacctcgctttttcccaatttatttatgccgcagtcttctacggtc

SEQ ID NO: 111804 - DNA, 80 bp, synthetic construct; identical to SEQ ID NO: 21963
  source 1..80: mol_type = other DNA

SEQ ID NO: 111805 - DNA, 80 bp, synthetic construct
  source 1..80: mol_type = other DNA
tgcgcccaggggtccgaccctgaccactgctgtaggagccaacttcctcactccccaggctggacaaccaatttccttta

SEQ ID NO: 111806 - DNA, 80 bp, synthetic construct
  source 1..80: mol_type = other DNA
tattaaattgctttaaacttataccccacaagcttctggaaagctgttgctgcctctggggaaaaggatccttcggctaa

SEQ ID NO: 111807 - DNA, 80 bp, synthetic construct
  source 1..80: mol_type = other DNA
gccctgggtctccaaacttcacaaaattctcaggagtaaattgggtcaaacagcacccattctcccactcttgcactatt

SEQ ID NO: 111808 - DNA, 80 bp, synthetic construct
  source 1..80: mol_type = other DNA
tctggggcaacagaggcatgagcctggagggtggtgtggcagagtgcaagggagggaaggagggggcaaatcctaactcc

SEQ ID NO: 111809 - DNA, 80 bp, synthetic construct; identical to SEQ ID NO: 21964
  source 1..80: mol_type = other DNA

SEQ ID NO: 111810 - DNA, 80 bp, synthetic construct
  source 1..80: mol_type = other DNA
aatagaagctacgaagaagttttctctagacgaacccttctccattcctgagcccaggagtaggcagggacccagggcac

SEQ ID NO: 111811 - DNA, 80 bp, synthetic construct
  source 1..80: mol_type = other DNA
gacacgcagacctcggcgggcaaagaccggcctcaaaccctctccttcaggtccccccgggaggggcagtggtgaaagcg

SEQ ID NO: 111812 - DNA, 80 bp, synthetic construct
  source 1..80: mol_type = other DNA
aaggctccttgtacaggccttggagggagagaatcgagtggccaaggtagcgcctttcccacggttagtcccggcccggg

SEQ ID NO: 111813 - DNA, 80 bp, synthetic construct; identical to SEQ ID NO: 21965
  source 1..80: mol_type = other DNA

SEQ ID NO: 111814 - DNA, 80 bp, synthetic construct
  source 1..80: mol_type = other DNA
gagacggagtttcgctctgtcgcccaggctgcagtgcagtggcgcgatctcagctcacttcaacctcagcctcccgggtt

SEQ ID NO: 111815 - DNA, 80 bp, synthetic construct
  source 1..80: mol_type = other DNA
gagccaccgcgtccggcccaagcaagcttttttcccctcctccttaagccttgcatctagtctggggctactcaagtcct

SEQ ID NO: 111816 - DNA, 80 bp, synthetic construct
  source 1..80: mol_type = other DNA
ctgccacctaatctcatagaacctggatttcctcatccaaaacaaggggcctctccaggattagctggtgagcttcttgc

SEQ ID NO: 111817 - DNA, 80 bp, synthetic construct; identical to SEQ ID NO: 21966
  source 1..80: mol_type = other DNA

SEQ ID NO: 111818 - DNA, 80 bp, synthetic construct
  source 1..80: mol_type = other DNA
accctggaaatccaaagaataaacccagaatctcgagggccacccttgcccactccaggatagcagccggagcgcttctc

SEQ ID NO: 111819 - DNA, 80 bp, synthetic construct
  source 1..80: mol_type = other DNA
gatacattcacctactagtcctggtccccttttaactttttctccatggcagccacgcctgtatattacagaagaatcca

SEQ ID NO: 111820 - DNA, 80 bp, synthetic construct; identical to SEQ ID NO: 21967
  source 1..80: mol_type = other DNA

SEQ ID NO: 111821 - DNA, 80 bp, synthetic construct
  source 1..80: mol_type = other DNA
agctgtcctcttatagacggggacactgagacctagaaactccccaaaagtaacaccagcctgctaaacaaaggtggcgc

SEQ ID NO: 111822 - DNA, 80 bp, synthetic construct
  source 1..80: mol_type = other DNA
aaagggcggtttcgatttctccaaggcttcgcgggggccgggtgctcctggttaggctaaggtaggagcggcctgaagac

SEQ ID NO: 111823 - DNA, 80 bp, synthetic construct
  source 1..80: mol_type = other DNA
atccgccattgtattagtaaagcgtttactaaattaccgaatcaaaccgaactggcttaggttctcaatagcgtggaaat

SEQ ID NO: 111824 - DNA, 80 bp, synthetic construct
  source 1..80: mol_type = other DNA
gcgaataaccctgtccttgttctaaccccaggtcttgaagaaatactgtcccagctgagccccgcgtttacaagatgaag

SEQ ID NO: 111825 - DNA, 80 bp, synthetic construct; identical to SEQ ID NO: 21968
  source 1..80: mol_type = other DNA

SEQ ID NO: 111826 - DNA, 80 bp, synthetic construct
  source 1..80: mol_type = other DNA
cgtctgaaaagcgctacgcttggtgacaatttggcgtttccttaattaacaaaactctccccaaggcagagccagacact

SEQ ID NO: 111827 - DNA, 80 bp, synthetic construct
  source 1..80: mol_type = other DNA
ctctccggcctcctccccagccgccgcttccgctatcctcacggcccttgggaagcagctgggtaagagctgcggtcaaa

SEQ ID NO: 111828 - DNA, 80 bp, synthetic construct; identical to SEQ ID NO: 21969
  source 1..80: mol_type = other DNA

SEQ ID NO: 111829 - DNA, 80 bp, synthetic construct
  source 1..80: mol_type = other DNA
ggggcgcaaagtccagcaccggcgcccactgcgccgcgccgctcacaggcagggcacagccgccgccgccacccagggag

SEQ ID NO: 111830 - DNA, 80 bp, synthetic construct
  source 1..80: mol_type = other DNA
cctaacttggcccagatgccgcccgggtcccggactccctgctgctctggctgctgtaggcacccaggcccggagcggag

SEQ ID NO: 111831 - DNA, 80 bp, synthetic construct
  source 1..80: mol_type = other DNA
gggaagtgggggagcggacaggcggtcgggttgcggagagcccccgggtgtgggcgctgccttgaactccttaccccagc
